(19) United States
(12) Patent Application Publication
(10) Pub. No.: US 2023/0310582 A1
(43) Pub. Date: Oct. 5, 2023

(54) SARS-2 SPIKE PROTEIN DESIGNS, COMPOSITIONS AND METHODS FOR THEIR USE

(71) Applicant: Duke University, Durham, NC (US)

(72) Inventors: Rory Henderson, Durham, NC (US); Kevin Saunders, Durham, NC (US); Barton F. Haynes, Durham, NC (US); Priyamvada Acharya, Durham, NC (US)

(21) Appl. No.: 17/919,111

(22) PCT Filed: Apr. 14, 2021
(86) PCT No.: PCT/US2021/027242

§ 371 Date: Oct. 14, 2022

Related U.S. Application Data
(60) Provisional application No. 63/009,969, filed on Apr. 14, 2020.
(60) Provisional application No. 63/026,588, filed on May 18, 2020.
(60) Provisional application No. 63/044,629, filed on Jun. 26, 2020.

(51) Int. Cl. A61K 39/215; C07K 14/005; A61P 31/14

(52) U.S. Cl. CPC A61K 39/215; C07K 14/005; A61P 31/14

(57) ABSTRACT

The invention provides SARS-2 spike protein designs and uses thereof.

[0001] This application claims the benefit of and priority to U.S. Patent Application No. 63/009,969 filed Apr. 14, 2020, U.S. Patent Application No. 63/026,588 filed May 18, 2020 and U.S. Patent Application No. 63/044,629 filed Jun. 26, 2020, the content of each application is herein incorporated by reference in its entirety.

[0002] This invention was made with government support under administrative supplement to NIH R01 AI145687 for coronavirus research and a grant from the State of North Carolina from the Federal CARES Act. The government has certain rights in the invention.

[0003] All patents, patent applications and publications cited herein are hereby incorporated by reference in their entirety. The disclosures of these publications in their entireties are hereby incorporated by reference into this application in order to more fully describe the state of the art as known to those skilled therein as of the date of the invention described and claimed herein.

[0004] This patent disclosure contains material that is subject to copyright protection. The copyright owner has no objection to the facsimile reproduction by anyone of the patent document or the patent disclosure as it appears in the U.S. Patent and Trademark Office patent file or records, but otherwise reserves any and all copyright rights.

### SEQUENCE LISTING

[0005] The instant application contains a Sequence Listing which has been submitted electronically in ASCII format and is hereby incorporated by reference in its entirety. Said ASCII copy, created on May 21, 2021, is named 2933311-041WO1_SL and is 1,540,060 bytes in size.

### TECHNICAL FIELD

[0006] The invention relates, in general, to modified SARS-CoV-2 proteins, nucleic acids encoding these, methods of making recombinant proteins and nucleic acids, compositions comprising these and their use in vaccination regimens, and diagnostic assays.

### BACKGROUND

[0007] The ongoing global pandemic of the new SARS-CoV-2 coronavirus presents an urgent need for the development of effective preventative and treatment therapies.

[0008] Development of an effective vaccine for prevention of coronavirus (SARS-2) infection is a global priority.

### SUMMARY

[0009] In certain aspects the invention provides SARS-CoV-2 (“SARS-2”) spike protein designs. In certain embodiments, the protein design provides a stabilized protein conformation(s) of the SARS-2 spike protein trimer. In non-limiting embodiments, the modified SARS-2 spike protein comprising S383C D985C (rS2d) amino acid changes as described in FIGS. 8 and 11. The rS2d coronavirus design can comprise additional modification, for e.g. without limitations as described in FIG. 11. Modification can also include N165A or the N234A changes in the spike protein as described in Example 4. The modifications can be incorporated in full length sequences, ectodomain or any other SARS-2 protein fragment.

[0010] In certain embodiments, the inventive designs are recombinant proteins. In certain embodiments, the inventive designs are nucleic acids. Nucleic acids include without limitation modified mRNAs.

[0011] In certain aspects, the invention provides modified SARS-2 spike proteins, for example but not limited in a stabilized conformation, nucleic acid molecules and vectors encoding these proteins, and methods of their use and production are disclosed. In several embodiments, the modified SARS-2 spike proteins and/or nucleic acid molecules can be used to generate an immune response to coronavirus in a subject. In some embodiments, the proteins and/or nucleic acid molecules can be used to generate an immune response to SARS-2 in a subject. In additional embodiments, the therapeutically effective amount of the modified SARS-2 spike proteins and/or nucleic acid molecules can be administered to a subject in a method of treating or preventing coronavirus infection. In some embodiments, the proteins and/or nucleic acid molecules can be administered to a subject in a method of treating or preventing SARS-2 infection. In certain embodiments, the proteins of the invention can be used in diagnostic assays.

[0012] In certain aspects, the invention provides coronavirus (e.g. SARS-2) S protein ectodomain trimers in a stabilized conformation, nucleic acid molecules and vectors encoding these proteins, and methods of their use and production. In several embodiments, the coronavirus (e.g. SARS-2) S protein ectodomain trimers and/or nucleic acid molecules can be used to generate an immune response to coronavirus in a subject. In some embodiments, the proteins and/or nucleic acid molecules can be used to generate an immune response to SARS-2 in a subject. In additional embodiments, the therapeutically effective amount of the coronavirus (e.g. SARS-2) S protein ectodomain trimers and/or nucleic acid molecules can be administered to a subject in a method of treating or preventing coronavirus infection. In some embodiments, the proteins and/or nucleic acid molecules can be administered to a subject in a method of treating or preventing SARS-2 infection. In certain embodiments, the proteins of the invention can be used in diagnostic assays.

[0013] In certain embodiments, the modified SARS-2 spike proteins do not include modification as described in US Patent Publication 20200061185. In certain embodiments the modified SARS-2 spike proteins do not include the two proline modification (K986P+V987P (2P)) substitutions in the S2 domain. See Edwards et al. Nature Structural & Molecular Biology volume 28, pages 128-131(2021) and references therein.

[0014] The invention provides amino acid or nucleic acids sequences encoding such spike protein designs. Provided are also nucleic acids, including modified mRNAs which are stable and can be used as immunogens. Non-limiting embodiments include recombinant proteins, trimers, multimerized proteins, e.g. but not limited to nanoparticles. Provided also are nucleic acids optionally designed as vectors, for example for recombinant expression and/or stable integration, e.g. but not limited to, a DNA encoding trimer for stable expression, or virus-like particle (VLP) incorporation. In non-limiting embodiments a DNA encodes a SARS-2 spike protein for stable expression. In non-limiting embodiments a DNA encodes a SARS-2 spike protein for stable expression as a protomer which trimerizes to form a SARS-2 spike protein trimer. In non-limiting embodiments, nucleic acids are mRNA, including but not limited to modified mRNA which are used immunogens. Modified mRNAs can be formulated in any suitable formulation, including but not limited to lipidnanoparticles (LNPs) and/or liposomes.

[0015] In some embodiments a protein design is based on SARS-2 spike protein if it is characterized as having 99%, 98%, 97%, 96%, 95%, 94%, 93%, 92%, 91%, 90%, 89%, 88%, 87%, 86%, 85%, 84%, 83%, 82%, 81%, 80%, 79%, 78%, 77%, 76%, or 75% similarity or identity to the designs described herein.

[0016] In non-limiting embodiments the invention provides SARS-2 S protein trimers stabilized in a prefusion conformation, nucleic acid molecules and vectors encoding these proteins, and methods of their use and production. In several embodiments, the SARS-2 S protein trimers and/or nucleic acid molecules can be used to generate an immune response to coronavirus in a subject. In some embodiments, the protein trimers and/or nucleic acid molecules can be used to generate an immune response to SARS-2 in a subject. In additional embodiments, the therapeutically effective amount of the SARS-2 S protein trimers and/or nucleic acid molecules can be administered to a subject in a method of treating or preventing coronavirus infection. In some embodiments, the protein trimers and/or nucleic acid molecules can be administered to a subject in a method of treating or preventing SARS-2 infection.

[0017] In certain aspects, the invention provides a modified SARS-2 spike protein comprising a sequence modified with amino acid changes as described herein. In certain aspects, the invention provides a recombinant, non-naturally occurring SARS-2 spike protein comprising a sequence modified with amino acid changes as described herein. Non-limiting embodiments of sequences are shown in FIG. 8, 10 and FIG. 25.

[0018] In certain aspects, the invention provides a recombinant SARS-2 spike protein comprising all the consecutive amino acids after the signal peptide of the amino acid sequences described herein. For specific non-limiting embodiments of sequences see FIG. 8, 10 and FIG. 25.

[0019] In certain aspects, the invention provides a nucleic acid encoding the modified SARS-2 spike protein described herein. In non-limiting embodiments, the nucleic acid is a modified mRNA. In certain embodiments, the mRNA is in a composition comprising LNPs. In certain embodiments, the mRNA is in a composition comprising liposomes.

[0020] In certain embodiments, the nucleic acid is comprised in a vector and is operably linked to a promoter.

[0021] In certain embodiments the sequence is modified with modifications described as Clusters 1-11. In certain embodiments the design can comprise any combination of modifications within any one Cluster, and/or combination of modifications from any of the modifications from any one of Clusters 1-11 (FIGS. 8 and 10). In non-limiting embodiments, the combinations are: D985C+S383C; D985C+S383C, T866C+G669C, L966C+A570C; K41C+A520C; D985C+S383C, T866C+G669C, F43C+G566C; K41C+A520C, T866C+G669C, L966C+A570C.

[0022] In certain embodiments, the invention provides modified SARS-2 spike protein comprising any combination of modifications within any one Cluster and further comprising N165A variation or the N234A variation as described in Example 4. Additional stabilizing mutations can be added to these modified SARS-2 spike designs.

[0023] Any one of the modifications described herein can be engineered in a full length SARS-2 S sequence or in a fragment, e.g. but not limited to the ectodomain.

[0024] In certain aspects the invention provides a composition comprising a recombinantly produced modified SARS-2 spike protein of any one of the claims and a carrier. In certain embodiments, the compositions are immunogenic. In certain embodiments the compositions comprised an adjuvant. Any suitable adjuvant can be used.

[0025] In certain aspects the invention provides a composition comprising a nucleic acid encoding any of the modified SARS-2 spike proteins and a carrier. Non-limiting embodiments of nucleic acids are shown in FIG. 25. Embodiments herein are also modified mRNA, for example comprising suitable modifications for expression as immunogens. Non-limiting examples include modified nucleosides, capping, polyA tail, and the like. In certain embodiments the compositions comprise an adjuvant.

[0026] In certain embodiments the designs produce a soluble protein. In certain embodiments the designs are comprised in a protomer which can form a trimer. In certain embodiments the designs comprise a transmembrane (TM) domain.

[0027] In certain embodiments the compositions comprise a SARS-2 S ectodomain trimer comprising protomers comprising sequence modification as described here in.

[0028] In non-limiting embodiments, the designs comprise additional modifications to allow multimerization. In non-limiting embodiments, wherein the design comprises a soluble ectodomain, additional modifications can be included to allow multimerization. In a non-limiting embodiment, a C-terminal residue of the protomers in the ectodomain of the modified SARS-2 spike protein is linked to a trimerization domain by a peptide linker, or is directly linked to the trimerization domain. In some embodiments, the trimerization domain is a T4 fibritin trimerization domain. In one example, a T4 fibritin trimerization domain comprises the amino acid sequence set forth as GYIPEAPRDGQAYVRKDGEWVLLSTF (SEQ ID NO: 1). In some embodiments, a protease cleavage site (such as a thrombin cleavage site) can be included between the C-terminus of the recombinant SARS-2 spike protein ectodomain and the T4 fibritin trimerization domain to facilitate removal of the trimerization domain as needed, for example, following expression and purification of the recombinant SARS-2 S ectodomain.

[0029] In certain embodiments, the modified SARS-2 spike protein further comprises one or more additional amino acid substitutions that stabilize the recombinant ectodomain trimer in the prefusion conformation.

[0030] In certain embodiments, the modified SARS-2 spike designs further comprise furin protease cleavage sites and/or a cathepsin L cleavage site. In certain embodiments, the modified SARS-2 spike protein trimer is soluble.

[0031] In certain embodiments, a C-terminal residue of the protomers in the ectodomain of the modified SARS-2 spike protein is linked to a transmembrane domain by a peptide linker, or is directly linked to the transmembrane domain. In certain embodiments, the modified SARS-2 spike protein is linked to form a protein nanoparticle subunit by a peptide linker, or is directly linked to the protein nanoparticle subunit. In certain embodiments, the protein nanoparticle subunit is a ferritin nanoparticle subunit.

[0032] In certain aspects the invention provides a protein nanoparticle, comprising any one of the protein immunogens of the invention.

[0033] In certain aspects the invention provides a virus-like particle comprising any one of the immunogens of the invention.

[0034] In certain aspects the invention provides an isolated nucleic acid molecule encoding a protomer of the modified SARS-2 spike protein of the invention. In certain embodiments, the nucleic acid molecule is operably linked to a promoter. In certain embodiments, the nucleic acid molecule is an RNA molecule.

[0035] In certain aspects, the invention provides a vector comprising a nucleic acid molecule encoding any one of the inventive proteins. In certain embodiments, the vector is a viral vector.

[0036] In certain aspects, the invention provides an immunogenic composition comprising any one of the proteins and/or nucleic acids of the invention, and a pharmaceutically acceptable carrier.

[0037] In certain aspects, the invention provides a method of producing a recombinant SARS-2 spike protein of the invention, comprising: expressing the nucleic acid molecule or vector comprising a nucleic acid encoding in a host cell to produce the recombinant protein, which in certain embodiments is a trimer; and purifying the recombinant protein.

[0038] In certain aspects, the invention provides a recombinant cell comprising a nucleic acid encoding the modified SARS-2 spike protein of the invention.

[0039] In certain aspects the invention provides a method for generating an immune response to an SARS-CoV-2 in a subject, comprising administering to the subject an effective amount of any one of the immunogens, wherein the immunogen is a recombinant protein, a nucleic acid, and/or a combination thereof to induce an immune response. In certain embodiments, the recombinant protein is formulated with any suitable adjuvant. In certain embodiments, the nucleic acid is DNA which can be administered by any suitable method. In certain embodiments, the nucleic acid is an mRNA, which can be administered by any suitable methods. In certain embodiments, the mRNA is formulated in an LNP. In certain embodiments, the mRNA is formulated in a liposome LNP. A skilled artisan can readily determine the dose and number of immunizations needed to induce immune response. Various assays are known and used in the art to measure to level, breadth and durability of the induced immune response.

[0040] In certain aspects the invention provides modified coronavirus spike proteins designs including but not limited to protein designs comprising spike protein and/or various spike portions/domains from SARS-CoV-2 (SARS-2), SARS-CoV-1 (CoV1), MERS, or any other coronavirus spike protein, wherein in certain embodiments these proteins are designed to form multimeric complexes. The invention provides amino acid and nucleic acid sequences of recombinant coronavirus spike proteins or portions thereof, wherein in certain embodiments these spike proteins or portions/domains are multimerized, and can be used as an antigen to induce an immunogenic response. In some embodiments the antigen comprises any suitable portion from a spike protein. In non-limiting embodiments are portions of the spike protein which comprise epitopes conserved between different coronaviruses. In some embodiments the antigen comprises RBD domain from a spike protein. In some embodiments the antigen comprises NTD domain from a spike protein. In some embodiments the antigen comprises FP domain from a spike protein. The sequence of the spike protein is any suitable sequence coronavirus sequence including without limitation SARS-CoV1, SARS-CoV2, MERS, bat coronavirus, pangolin or other animal coronaviruses. In non-limiting embodiments the spike protein sequences comprise any variation in amino acid sequences, including without limitation Wuhan SARS-CoV2 sequence, UK SARS-CoV2 variant B.1.1.7, South African variant 1.351, US SARS-CoV-2 variants with L452R mutations and Brazilian variant P.1. Additional SARS-2 spike protein sequences from circulating viruses are found in the GISAID EpiFlu™ Database. These sequences can also be designed with any of the modifications described herein. In certain embodiments, the immune response treats, prevents or inhibits infection with the SARS-CoV-2. In certain embodiments, the immune response generated by the immunogens inhibits replication of the SARS-CoV-2 in the subject.

[0041] In certain aspects the invention provides a modified SARS-2 spike protein sequence or amino acid sequence encoding the same, wherein the protein sequence comprising amino acid changes as described in FIG. 8, 10 or 25. Non-limiting embodiments of sequences comprising specific amino acid changes are shown in FIG. 8 (Clusters 1-11), FIG. 10 (sequences with rsd2 mutations and comprising additional modifications, for example selected from Cluster mutations) or FIG. 25. A modified SARS-2 spike protein sequence or amino acid sequence encoding the same, wherein the protein sequence comprising S383C D985C (rS2d) amino acid changes as described in FIG. 8, 10 or 25. In a non-limiting embodiment, modified SARS-2 spike protein comprising S383C D985C (rS2d) is shown in Table 8 and FIG. 25P.

[0042] In certain aspects the invention provides a recombinant SARS-2 spike protein comprising all the consecutive amino acids after the signal peptide of the polypeptide sequences in FIG. 8, 10 or 25. Specific non-limiting embodiments of sequences are shown in FIG. 8, 10 or FIG. 25.

[0043] In certain aspects the invention provides a nucleic acid encoding the modified SARS-2 spike protein of any of the preceding claims.

[0044] In certain embodiments, the nucleic acid of any of the preceding claims is a modified mRNA. In certain embodiments, the mRNA is in a composition comprising LNPs.

[0045] In certain embodiments, the nucleic acid is comprised in a vector and is operably linked to a promoter.

[0046] In certain aspects, the invention provides a composition comprising a recombinantly produced modified SARS-2 spike protein of any one of the claims and a carrier. In certain embodiments, the compositions comprise a trimer comprising protomers with amino changes as described herein. In certain embodiments, the compositions are immunogenic. In certain embodiments the compositions comprised an adjuvant. Any suitable adjuvant can be used.

[0047] In certain aspects, the invention provides a composition comprising a nucleic acid encoding any of the modified SARS-2 spike proteins and a carrier.

[0048] In certain aspects, the invention provides a protein nanoparticle, comprising any one of the protein immunogens of the invention. In certain embodiments, the protein nanoparticle subunit is a ferritin nanoparticle subunit.

[0049] In certain aspects, the invention provides a virus-like particle comprising any one of the immunogens of the invention.

[0050] In certain aspects, the invention provides a host cell comprising a nucleic acid molecule encoding a modified SARS-2 spike protein of the invention.

[0051] In certain aspects, the invention provides a method of producing a recombinant SARS-2 protein of the invention, comprising: expressing the nucleic acid molecule or vector comprising a nucleic acid encoding in a host cell to produce the recombinant protein, which in certain embodiments is a trimer; and purifying the recombinant protein.

[0052] In certain aspects, the invention provides an immunogenic composition comprising any one of the proteins, nucleic acids, nanoparticle or VLP of the preceding claims and a pharmaceutically acceptable carrier. The immunogenic composition of the preceding claim, further comprising an adjuvant.

[0053] In certain aspects, the invention provides a method for inducing an immune response to an SARS-2 in a subject, comprising administering to the subject an effective amount of any one of the immunogens and/or the immunogenic composition of the preceding claims to induce an immune response.

[0054] In certain aspects, the invention provides a modified SARS-2 spike protein comprising the amino acid sequence of the N165A variant or the N234A variant.

[0055] In certain aspects, the invention provides a recombinant SARS-2 spike protein comprising all the consecutive amino acids after the signal peptide of a modified SARS-2 spike protein comprising the amino acid sequence of the N165A variant or the N234A variant.

[0056] In certain aspects, the invention provides a nucleic acid encoding a modified SARS-2 spike protein of the invention or a recombinant SARS-2 spike protein of the invention.

[0057] In certain embodiments, the nucleic acid of the invention is comprised in a vector and is operably linked to a promoter. In certain embodiments, the nucleic acid of the invention is operably linked to a promoter suitable for in vitro mRNA expression.

[0058] In certain embodiments, a nucleic acid of the invention is a modified mRNA. In certain embodiments, the mRNA is in a composition comprising LNPs.

[0059] In certain aspects, the invention provides a composition comprising a recombinantly produced modified SARS-2 spike protein, or a nucleic acid encoding a recombinant protein of the invention and a carrier. In certain embodiments, the compositions comprise a trimer comprising protomers with amino changes as described herein. In certain embodiments, the compositions are immunogenic. In certain embodiments the compositions comprised an adjuvant. Any suitable adjuvant can be used.

[0060] In certain aspects the invention provides a protein nanoparticle, comprising a modified recombinant SARS-2 spike protein of the invention. In certain embodiments, the protein nanoparticle subunit is a ferritin nanoparticle subunit.

[0061] In certain aspects the invention provides a virus-like particle, comprising a modified recombinant SARS-2 spike protein of the invention.

[0062] In certain aspects the invention provides a host cell comprising a nucleic acid molecule encoding the modified SARS-2 spike protein of the invention. In certain aspects the invention provides an in vitro transcription reaction comprising a nucleic acid encoding anyone of the modified SARS-2 spike protein of the invention and reagents suitable for carrying out the in vitro transcription reaction to produce mRNA, including without limitation modified mRNA.

[0063] In certain aspects, the invention provides methods of producing a modified SARS-2 spike protein of the invention, comprising: expressing the nucleic acid molecule or vector comprising a nucleic acid encoding in a host cell to produce the recombinant protein, which in certain embodiments is a trimer; and purifying the recombinant protein.

[0064] In certain aspects, the invention provides an immunogenic composition comprising any one of the proteins, nucleic acids, nanoparticle or VLP of the invention and a pharmaceutically acceptable carrier. In certain embodiments, the immunogenic composition further comprises an adjuvant.

[0065] In certain aspects the invention provides, a method for inducing an immune response to an SARS- 2 in a subject, comprising administering to the subject an effective amount of any one of the immunogens and/or the immunogenic composition of the invention in an amount and manner sufficient to induce an immune response.

### BRIEF DESCRIPTION OF DRAWINGS

[0066] The patent or application file contains at least one drawing executed in color. Copies of this patent or patent application publication with color drawing(s) will be provided by the Office upon request and payment of the necessary fee.

[0067] FIGS. 1A-1C: structure of the SARS-CoV S-protein. A) ‘Down’ configuration of the S-protein. Single protomer colored according to (C, upper). Other two protomers colored according to (C, lower). B) ‘Up’ configuration of the S-protein colored as in (A). C) Line diagram of the SARS-CoV S-protein. The NTD′ region is highlighted in cyan. HR2 was not resolved in this structure.

[0068] FIGS. 2A-2F: Vector based analysis of the CoV S-protein. A) A single protomer of the CoV S-protein with labeled domains. B) A simplified diagram of the CoV S-protein depicting the centroids and vectors connecting them with the determine angles (θ) and dihedrals (ϕ) labeled. C) The SARS-2 (left; red) and MERS (right; blue) structures each with a single protomer depicted in a cartoon representation and the remaining two in a surface representation. D) Principal components analysis of the SARS and MERS protomers including measures between S1 and S2 domains. E) Principal components analysis of the SARS, MERS, HKU1, and Murine CoV protomers including measures only between S1 domains. F) Cluster plots of the angles and dihedrals between S1 and S2 domains.

[0069] FIGS. 3A-3C: Purification of recombinant SARS-2 S protein and binding to ACE-2 receptor. A) SDS-PAGE of the SARS-2 S protein. Lane 1: molecular weight ladder, with relevant bands labeled in kilodaltons; Lanes 2 and 3: Elution from StrepTactin resin under reducing (Lane 2) and non-reducing (Lane 3) conditions; Lanes 4 and 5: Purified protein after SEC under reducing (Lane 4) and non-reducing (Lane 5) conditions. The SARS-2 S protein band is denoted with a black arrow. (B) SEC of the affinity-purified SARS-2 S protein. (C) SPR sensorgrams showing binding of different concentrations of the human ACE2 receptor to immobilized SARS-2 S protein.

[0070] FIGS. 4A-4C: NSEM of the recombinant SARS-2 spike. A) Representative micrograph with particle picks shown in green. B) Representative 2D class averages. C) 3D reconstructed map shown as a semi-transparent grey surface with underlying fitted model (PDB 6VSB) shown in ribbon representation. 166 micrographs were collected on a Philips EM420 microscope. A total of 85,341 particles were picked. After multiple rounds of 2D and 3D classifications, an asymmetric 3D reconstruction at an overall resolution of ˜17.5 Å was obtained from a final cleaned-up stack of 41,941 particles.

[0071] FIGS. 5A-5C: Cryo-EM of the recombinant SASR-CoV-2 spike. A) Representative micrograph. B) Representative 2D class averages. C) Cryo-EM map at 5.6 Å resolution depicting side and top views.

[0072] FIGS. 6A-6E: Molecular simulation guided mechanism for CoV S-protein closed, ‘down’ to open ‘up’ configuration. A) Counts plot for the first two time-lagged independent components analysis. B) Implied time-scale plot depicting Markov model-based timescales for different processes in the dataset at differing lag-times. C) Two representative macrostates from the Markov model. A down state, tight (DTE) configuration and a down state mobile (DUtDE) configuration. D) Nested plots of vector-based dihedrals comparing RBD motion, NTD motion, and S1 to S2 motion, from top to bottom, respectively, with the DTE (left) and DUtDE (right) values with mean and standard deviation. E) Mechanism for closed to open transitions.

[0073] FIG. 7: SARS-2 sites for differential domain stabilization. Image depicts the closed, all RBD ‘down’ state trimer colored according to FIG. 1 (C). Mutation clusters are identified with c-α atoms of mutable residues shown as spheres with mutants identified next to the cluster image. Mutations developed based upon MHV, MERS, and simulation results are noted beside their respective mutants.

[0074] FIG. 8A-L shows non-limiting embodiments amino acid sequences of SARS-2 protein designs comprising certain modifications—Cluster 1-11 designs. FIG. 8A shows Parent sequence (nCoV-1 nCoV-2P), FIG. 8B (including FIGS. 8B-1 to 8B-7) shows Cluster 1 modifications, FIG. 8C (including FIGS. 8C-1 to FIG. 8C-7) shows Cluster 2 modifications, FIG. 8D (including FIG. 8D-1 to FIG. 8D-10) shows Cluster 3, FIG. 8E (including FIG. 8E-1 to FIG. 8E-6) shows Cluster 4 modifications, FIG. 8F (including FIG. 8F-1 to FIG. 8F-6) shows Cluster 5 modifications, FIG. 8G (including FIG. 8G-1 to FIG. 8G-6) shows Cluster 6 modifications, FIG. 8H (including FIG. 8H-1 to FIG. 8H-4) shows Cluster 7 modifications, FIG. 8I (including FIG. 8I-1 to FIG. 8I-7) shows Cluster 8 modifications, FIG. 8J (including FIG. 8J-1 to FIG. 8J-12) shows Cluster 9 modifications, FIG. 8K (including FIG. 8K-1 to FIG. 8K-8) shows Cluster 10 modifications, FIG. 8L (including FIG. 8L-1 to FIG. 8L-6) shows Cluster 11 modifications. Underlined amino acids indicate positions of cluster amino acid changes. A skilled artisan can readily determine the signal peptide sequences. Signal peptide sequences can be removed during recombinant production of proteins. In non-limiting embodiments, provided are amino acid sequences of recombinant proteins which do not include amino acids of comprising a signal peptide. The sequence presented here are of the ectodomain. The modifications can be incorporated in full length sequences, or any other SARS-2 protein fragment. The modifications can be incorporated in sequences which do not comprise the 2P mutations. FIG. 8A-L discloses SEQ ID NOS 6-85, respectively in order of appearance.

[0075] FIGS. 9A-B shows non-limiting embodiments of amino acid sequence of SARS-2 protein designs. FIGS. 9A-B disclose SEQ ID NOS 86-87, respectively, in order of appearance.

[0076] FIG. 10A-M shows non-limiting embodiments of amino acid sequences of SARS-2 protein designs comprising rS2d mutations and further modifications selected from the cluster designs. FIG. 10A-10H show rS2d+S2 modification. FIG. 10I shows rS2d plus SD2 to S2. FIG. 10J-10M show S2 stabilization and SD2 to S2. Additional cluster modifications can be combined with rS2d mutations. The modifications can be incorporated in full length sequences, or any other SARS-2 protein fragment. FIG. 10A-M discloses SEQ ID NOS 88-100, respectively, in order of appearance.

[0077] FIG. 11A-C. SARS-CoV-2 mRNA-lipid nanoparticle (LNP) vaccines elicited neutralizing antibodies in rhesus macaques. (A) Schematic diagram of the mRNA-LNP vaccines in this study. The mRNA-LNP vaccines that encode monomer receptor-binding domain (RBD), K986P/V987P mutations stabilized full-length Spike protein (Spike 2P), S383C/D985C/K986PN987P mutations stabilized full-length Spike protein (Spike 2P 2C), or unstabilized Spike protein were compared. A luciferase expressing mRNA-LNP vaccine was made as a control. (B) Rhesus macaque vaccination and challenge regimen. Rhesus macaque (n=8 per group) were immunized intramuscularly by mRNA-LNP vaccine for two times in Week 0 and 4, followed by 10⁵ PFU of SARS-CoV-2 challenge via intranasal and intratracheal routes. Respiratory samples including bronchoalveolar lavage (BAL) and nasal swab were collected on Day 0, 2, 4, 7 post-challenge for subgenomic RNA (sgRNA) viral load test, and were measured at the indicated pre-challenge and post-challenge timepoints. Lungs were harvested by necropsy on Week 11 and 12 for histopathology analysis. (C) Vaccine-induced SARS-CoV-2 specific antibodies. Serum IgG binding activities to Spike 2P (S-2P), S-2P D614G, RBD, n-terminal domain (NTD), and S2 domain were tested by ELISA and shown as log AUC mean value±SEM.

[0078] FIG. 12. Vaccine-induced antibodies block ACE-2 and neutralizing antibodies binding to Spike protein. The ability of serum blocking ACE-2, RBD neutralizing antibodies DH1041 and DH1047, NTD neutralizing antibodies DH1050.1 and NTD non-neutralizing antibodies DH1052 from binding to S-2P were tested by ELISA. Percentage of blocking (mean value±SEM) were shown.

[0079] FIG. 13. SARS-CoV-2 mRNA-lipid nanoparticle (LNP) vaccines elicited neutralizing antibodies in rhesus macaques.

[0080] Vaccine-induced neutralizing antibodies against pseudotyped (top panels) or live (bottom panels) SARS-CoV-2 viruses. ID50, inhibitory dilutions at which 50% viruses were neutralized. Each dot indicates one animal, and the bars show geometric means. Pseudovirus assays were performed in 293T/ACE2 cells, and live SARS-CoV-2 microneutralization assays were performed in Vero cells.

[0081] FIG. 14. Reduced SARS-CoV-2 viral replication in respiratory tract of vaccinated macaques. (A-B) SARS-CoV-2 (A) envelope gene (E gene) sgRNA and (B) nucleocapsid gene (N gene) sgRNA in bronchoalveolar lavage (BAL) samples on Day 0 (pre-challenge), Day 2, Day 4 and Day 7 post challenge.

[0082] FIG. 15. Reduced SARS-CoV-2 viral replication in respiratory tract of vaccinated macaques. SARS-CoV-2 (top panels) E gene sgRNA and (bottom panes) N gene sgRNA in nasal swab samples on Day 0 (pre-challenge), Day 2, Day 4 and Day 7 post challenge.

[0083] FIG. 16A-D. Bronchoalveolar lavage (BAL) fluid cytokine responses before and after challenge in vaccinated macaques. 16A-C show Cytokines (IL-16, IP-10, IL-1aa) concentrations in BAL samples on Day 0 (pre-challenge), Day 2, Day 4 and Day 7 post challenge are shown for each macaque. Horizontal bars indicate group means. 16D shows the symbols used in 16A-C, and FIG. 17.

[0084] FIG. 17. Bronchoalveolar lavage (BAL) fluid cytokine responses before and after challenge in vaccinated macaques. Cytokines (FGF-2, Eotaxin, Fractalkine, MIP-3a) concentrations in BAL samples on Day 0 (pre-challenge), Day 2, Day 4 and Day 7 post challenge are shown for each macaque. Horizontal bars indicate group means.

[0085] FIG. 18A-E. Bronchoalveolar lavage (BAL) fluid cytokine responses before and after challenge in vaccinated macaques. 18A-C show Cytokines concentrations in BAL samples on Day 0 (pre-challenge), Day 2, Day 4 and Day 7 post challenge are shown for each macaque. Horizontal bars indicate group means. 18E shows the symbols for 18A-D.

[0086] FIG. 19A-D. Bronchoalveolar lavage (BAL) fluid cytokine responses before and after challenge in vaccinated macaques. Cytokines concentrations in BAL samples on Day 0 (pre-challenge), Day 2, Day 4 and Day 7 post challenge are shown for each macaque. Horizontal bars indicate group means.

[0087] FIG. 20A-D. Bronchoalveolar lavage (BAL) fluid cytokine responses before and after challenge in vaccinated macaques. Cytokines concentrations in BAL samples on Day 0 (pre-challenge), Day 2, Day 4 and Day 7 post challenge are shown for each macaque. Horizontal bars indicate group means.

[0088] FIG. 21A-E. Bronchoalveolar lavage (BAL) fluid cytokine responses before and after challenge in vaccinated macaques. Cytokines (21A-D) concentrations in BAL samples on Day 0 (pre-challenge), Day 2, Day 4 and Day 7 post challenge are shown for each macaque. Horizontal bars indicate group means. FIG. 21E shows the symbols used in 21A-D.

[0089] FIG. 22A-D. Bronchoalveolar lavage (BAL) fluid cytokine responses before and after challenge in vaccinated macaques. Cytokines concentrations in BAL samples on Day 0 (pre-challenge), Day 2, Day 4 and Day 7 post challenge are shown for each macaque. Horizontal bars indicate group means.

[0090] FIG. 23A-B. Monoclonal antibody isolation from RBD and S mRNA-LNP immunized macaques. (A) FACS plot of sort strategy for each macaque. (B) summary antibody specificities based on initial binding screen of monoclonal antibodies.

[0091] FIG. 24. Cross-reactive RBD-specific monoclonal antibody were elicited in SARS-CoV-2 mRNA-LNP immunized macaques. Heatmap of binding magnitude (log AUC) for a subset of monoclonal antibodies isolated from vaccinated macaques. RBD. RBD antibodies bound to bat and pangolin coronaviruses (BCoV RaTG13 and PC0V GXP4L).

[0092] FIG. 25A-25Q shows non-limiting embodiments of SARS-2 designs comprising various modifications. The modifications can be incorporated in full length sequences, or any other SARS-2 protein fragment. FIG. 25A includes FIGS. 25A-1 to FIG. 25A-4. FIG. 25B includes FIGS. 25B-1 to FIG. 25B-4. FIG. 25C includes FIGS. 25C-1 to FIG. 25C-4. FIG. 25D includes FIGS. 25D-1 to FIG. 25D-4. FIG. 25E includes FIGS. 25E-1 to FIG. 25E-4. FIG. 25F includes FIGS. 25F-1 to FIG. 25F-4. FIG. 25H includes FIGS. 25H-1 to FIG. 25H-8. FIG. 25I includes FIGS. 25I-1 to FIG. 25I-4. FIG. 25J includes FIGS. 25J-1 to FIG. 25J-4. FIG. 25K includes FIGS. 25K-1 to FIG. 25K-4. FIG. 25L includes FIGS. 25L-1 to FIG. 25L-4. FIG. 25M includes FIGS. 25M-1 to FIG. 25M-4. FIG. 25N includes FIGS. 25N-1 to FIG. 25N-4. FIG. 25Q includes FIGS. 25Q-1 to FIG. 25Q-8. FIG. 25A-25Q disclose SEQ ID NOS 101-167, respectively, in order of appearance.

[0093] FIG. 26A-26F show vector based analysis of the CoV S-protein demonstrates remarkable variability in S-protein conformation within ‘up’ and ‘down’ states between CoV strains. A) Cartoon representations of the ‘down’ (upper left) and ‘up’ (upper right) state structures colored according to the specified domains (lower). B) A single protomer of the CoV S-protein with labeled domains. C) A simplified diagram of the CoV S-protein depicting the centroids and vectors connecting them with the determine angles (θ) and dihedrals (ϕ) labeled. D) The SARS-2 (left; red) and MERS (right; blue) structures each with a single protomer depicted in a cartoon representation and the remaining two in a surface representation. E) Principal components analysis of the SARS and MERS protomers including measures between S1 and S2 domains. F) Principal components analysis of the SARS, MERS, HKU1, and Murine CoV protomers including measures only between S1 domains.

[0094] FIG. 27A-27J show vector based analysis of the CoV S-protein demonstrates remarkable variability in S-protein conformation within ‘up’ and ‘down’ states between CoV strains. A) Angle between the subdomain 1 to subdomain 2 vector and the subdomain 1 to RBD vector. B) Dihedral about the subdomain 1 to RBD vector. C) Angle between the RBD to subdomain 1 vector and the RBD to RBD helix vector. D) Dihedral about the subdomain 2 to subdomain 1 vector. E) Angle between the NTD′ to NTD vector and the NTD to NTD sheet motif vector. F) Dihedral about the dihedral aout the NTD to NTD′ vector. G) Angle between the NTD′ to subdomain 2 vector and the NTD′ to NTD vector. H) Angle between the subdomain 2 to NTD′ vector and the subdomain 2 to subdomain 1 vector. I) Diagram of the domains and relevant angles and dihedrals for S1 J) Cartoon representation of one protomer's S1 domains in the ‘down’ state overlaid with a ribbon representation of the ‘up’ state colored according to (I). Black (‘down’ state) and grey (‘up’ state) spheres represent domain centroids with lines connecting representing the vectors. Adjacent protomers represented as transparent surfaces.

[0095] FIGS. 28A-28F show negative stain electron microscopy analysis of S-protein constructs. A) Data tables, indicating construct names, mutations, observed classes, number and percent of particles per class and final resolution (gold-standard Fourier-shell correlation, 0.143 level). B) Raw micrographs. C) Representative 2D class averages. D) 3D reconstructions of 3-RBD-down classes, shown in top view, looking down the S-protein 3-fold axis on the left and tilted view on the right. Receptor binding domains and N-terminal domains of first structure marked with R and N, respectively. E) 3D reconstructions of 1-RBD-up classes. Up-RBD is marked with an asterisk. F) 3D reconstruction of 2-RBD-up class. Density for up-RBDs is weak, indicated by asterisks.

[0096] FIGS. 29A-29C show cryo-EM dataset reveals differential stabilization of the S-protein in the mutant ectodomain constructs. A) Two structural states of the SARS-CoV-2 S-protein ectodomain with the RBDs in the all ‘down’ state or a single RBD ‘up’ state. The resolution of the structure is provided below and to the left of each structure with the state population to the right. The S-protein spike highlighting the two regions of interest for structure and computation-based design. B) The rS2d RBD to S2 locked structure displaying only the all RBD down state. C) The u1S2q SD1 to S2 mutated structure displaying the all RBD ‘down’ state, the 1-RBD ‘up’ state, and, for the first time in the SARS-2 S ectodomain, the 2-RBD ‘up’ state.

[0097] FIGS. 30A-30D show cryo-EM structures of the “down” state in the r2S2d and u1S2q constructs reveal differential stabilization of domain positions. A) Alignment between the trimers of the designed disulfide linked rS2d (dark blue) mutant structure and the u1S2q (green). B) (left) Alignment between single protomers of the designed disulfide linked rS2d(dark blue) mutant structure and the u1S2q(green). (right) Zoomed in view of SD1 in both constructs demonstrating the shift in the subdomain with the 4 mutants. C) Structure and cryo-EM map depicting the RBD to S2 bridging density between the introduced cysteine residues. D) Structure and cryo-EM map depicting the SD1 and S2 mutations.

[0098] FIGS. 31A-31C show high-resolution structure of the u1S2q 1 RBD ‘up’ state reveals increasing relaxation of the triggered RBDs toward the unmutated structure. A) Cryo-EM map shown as grey mesh with underlying model in green cartoon representation; side (left) and top (right) views. B) Zoomed-in view showing the mutated residues. C) (top) Structure of the ‘up’ state RBD coupled ‘down’ state RBD (green) highlighting the shifted subdomain 1 to NTD′ position relative to the unmutated position (blue). (middle) Structure of the uncoupled ‘down’ state RBD (green) highlighting the moderately shifted subdomain 1 to NTD′ position relative to the unmutated position (blue). (bottom) Structure of the ‘up’ state RBD (green) highlighting the close alignment of subdomain 1 and the NTD′ regions to the unmutated position (blue).

[0099] FIGS. 32A-32C show structure of the u1S2q 2 RBD ‘up’ state indicates modest differences between the 1 RBD ‘up’ state's subdomain arrangement. A) Cryo-EM map structural alignment side view. B) Cryo-EM map structural alignment top view. C) Structure (green) and cryo-EM map depicting the mutated residue dispositions. The unmutated ‘up’ state protomer alignment is depicted in ribbons (blue).

[0100] FIG. 33 shows sites identified for differential stabilization of the SARS-CoV-2 S-protein. Single protomer colored according to FIG. 26 with remaining two protomers color according to S1 (light blue) and S2 (grey). Spheres indicate candidate mutation sites.

[0101] FIGS. 34A-34F show cryo-EM data processing details for r2S2d. (A) Representative micrograph. (B) CTF fit (C) Representative 2D class averages. (D) Ab initio reconstruction for the “down” state. (E) Refined map for the “down” state. (F) Fourier shell correlation curve for the “down” state.

[0102] FIGS. 35A-35L show cryo-EM data processing details for u1s2q. (A) Representative micrograph. (B) CTF fit (C) Representative 2D class averages. (D-F) Ab initio reconstructions for the (D) “down” state, (E) “1-up” state and (F) “2-up” state. (G-I) Refined maps for the (G) “down” state, (H) “1-up” state and (I) “2-up” state. (J-L) Fourier shell correlation curves for the (J) “down” state, (E) “1-up” state and (F) “2-up” state.

[0103] FIGS. 36A-36C show alignment of the rS2d and u1S2q designs with the unmutated construct. A) Structure of rS2d (dark blue) aligned to the unmutated construct (PDB ID 6VXX; red). B) Structure of u1S2q (green) aligned to the unmutated construct (PDB ID 6VXX; red). C) The u1S2q (green) mutation sites compared to the unmutated form (red).

[0104] FIGS. 37A-37B shows RBD proximal NTD glycans of SARS-2 MERS, SARS, and other β-CoV S-proteins. A) (left) Side view of the one RBD ‘up’ state SARS-2 structure and map (PDB ID 6VSB; EMDB 21375) depicting the reconstructed N165 and N234 NTD glycans protruding into the space occupied by the RBD in the ‘down’ state. (right) top view of the N165 and N234 glycans. B) Structures of the MERS, SARS, OC43, HKU1, and Murine S-proteins (PDB IDs 5W9H, 6CRW, 6OHV, 5108, and 3JCL, respectively) depicting the location of RBD proximal N-linked glycans. Closed (red), 1-up (green), 2-up (orange), and 3-up (blue) RBD state surfaces below cartoon representations indicate whether such states have been observed for each timer.

[0105] FIGS. 38A-38D show structure and antigenicity of the N165A and N234A SARS-CoV-2 ectodomain spikes. A) Percentage change in ACE2 binding for the N234A, and N165A mutant spikes, relative to the unmutated spike. Binding was measured by SPR with ACE-2 (with a C-terminal Fc tag) captured on an anti-Fc surface, and the spike as analyte. Error bars represent results from four independent injections. B) Representative ACE2 binding SPR response curves. C) NSEM results for the N234A spike. D) NSEM results for the N165A spike. For figures (C) and (D) shown from left to right are percentages of discrete 3D populations observed, representative micrograph, representative 2D class averages, discrete populations obtained by 3D classification.

[0106] FIGS. 39A-39H show structural comparison of the N234A mutant in the ‘up’ and ‘down’ configurations to the unmutated spike. A) Side view of the symmetric ‘down’ state N234A mutant S-protein trimer aligned to the unmutated trimer (PDB ID 6VXX, grey). B) Side view of a ‘down’ state NTD (green) depicting the shifted NTD relative to the unmutated form (grey) and the N165 glycan. Adjacent RBD is colored cyan. C) (upper) Map view of the apical β-sheet motif of the NTD for the N234A ‘down’ state (lower) Map view of the apical β-sheet motif of the NTD from the unmutated ‘down’ state (PDB ID 6VXX) D) The N234A trimer map density with the NTD (green) and RBD (cyan) coordinates aligned to the unmutated form (grey). E) Side view of the ‘up’ state N234A mutant S-protein trimer aligned to the unmutated trimer (PDB ID 6VYB, grey). F) (left) Cartoon representation of N234A ‘up’ state RBD (cyan) relative to the unmutated ‘up’ state RBD (grey). (right) as in (left) with the map density. G) Side view of the N165 glycan extending into the RBD ‘down’ state region near the ‘up’ state RBD. H) Top view of the N165 glycan extending into the RBD ‘down’ state region near the ‘up’ state RBD.

[0107] FIGS. 40A-40H show structural comparison of the N165A mutant in the ‘up’ and ‘down’ configurations to the unmutated spike. A) Side view of the symmetric ‘down’ state N165A mutant S-protein trimer aligned to the unmutated trimer (PDB ID 6VXX, grey). B) Side view of a single NTD (green) and adjacent RBD (red) with the ‘down’ state structure (grey) depicting the shift in the position of the NTD. C) Map view of the apical β-sheet motif of the NTD for the N165A ‘down’ state D) Zoomed in view of the NTD as in (C) with the map identifying the NTD shift. E) Side view of the symmetric ‘up’ state N165A mutant S-protein trimer aligned to the unmutated trimer (PDB ID 6VYB, grey). F) Side view of the ‘up’ state adjacent NTD (red) with N165 and N234 alpha carbons represented as spheres. G) Zoomed out view of the NTD as in (F) depicting the alignment of unmutated spike (grey) with the RBD in cyan. H) View of the NTD adjacent to the ‘down’ free state RBD.

[0108] FIGS. 41A-41C show SARS-2 and OC43 RBD proximal NTD glycans. A) Side view of a SARS-2 NTD (green) and RBD (purple) structure (PDB ID 6VXX) depicting the N234 glycan cleft. An RBD only structure (PDB ID 6M0J) was aligned to the trimer as a portion of the RBD is not present in the trimer structure. B) Side view of a SARS-2 NTD (green) and RBD (purple) structure (PDB ID 6VXX) depicting the N165 glycan. C) Side view of an OC43 NTD (magenta) and RBD (purple) structure (PDB ID 6OHW) depicting the N133 glycan.

[0109] FIGS. 42A-42C show SDS-PAGE and yields of purified S protein constructs. A) SDS-PAGE gels of the S protein constructs. R=reducing conditions; NR=non-reducing conditions and expression yields/L of the S protein constructs. B) Independent SPR replicate measures for the unmutated, N164A, and N234A mutants. Error bars represent results from multiple injections. C) ACE2 binding Kinetics measures of unmutated, N165A, and N234A S-protein with response curves (upper) and association/dissociation/affinity values (lower). ACE-2 was captured on an anti-Fc surface via a C-terminal Fc tag, and binding was measured by flowing over different concentrations of the spike constructs in independent injections.

[0110] FIGS. 43A-43J show thermostability of the S protein constructs. A-C) SEC profile of the S proteins. The dotted lines indicate the portion of the peak that was collected for further studies. The unmutated and u1S2q spikes were run on a Superose 6 Increase 10/300 column, and 93KJ and 94KJ spike was run on an analytical Superose 6 Increase 5/150 column. D-I) Unfolding profile curves \obtained by intrinsic fluorescence measurements using Tycho NT. 6. D-F) show ratio between fluorescence at 350 nm and 330 nm. G-I) plot the first derivative of this ratio. Asterisk mark the inflection temperatures that are tabulated in J)

[0111] FIGS. 44A-44I show high-resolution cryo-EM structure determination pipeline for the N234A mutant ‘up’ and ‘down’ states. A) Representative micrograph with selected particles circled. B) Representative CTF fit. C) Representative 2D classes D) Ab initio reconstruction of the ‘down’ state trimer depicting side (left) and top (right) views. E) Ab initio reconstruction of the ‘up’ state trimer depicting side (left) and top (right) views. F) High-resolution map of the C3 symmetric refinement of the ‘down’ state depicting side (left) and top (right) views. G) High-resolution map of the C1 asymmetric refinement of the ‘up’ state depicting side (left) and top (right) views. H) (top left) Fourier shell correlation curve for the ‘down’ state map, (bottom left) representative density, (right) local map resolutions. I) (top left) Fourier shell correlation curve for the ‘up’ state map, (bottom left) representative density, (right) local map resolutions.

[0112] FIGS. 45A-45I show high-resolution cryo-EM structure determination pipeline for the N165A mutant ‘up’ and ‘down’ states. A) Representative micrograph with selected particles circled. B) Representative CTF fit. C) Representative 2D classes D) Ab initio reconstruction of the ‘down’ state trimer depicting side (left) and top (right) views. E) Ab initio reconstruction of the ‘up’ state trimer depicting side (left) and top (right) views. F) High-resolution map of the C3 symmetric refinement of the ‘down’ state depicting side (left) and top (right) views. G) High-resolution map of the C1 asymmetric refinement of the ‘up’ state depicting side (left) and top (right) views. H) (top left) Fourier shell correlation curve for the ‘down’ state map, (bottom left) representative density, (right) local map resolutions. I) (top left) Fourier shell correlation curve for the ‘up’ state map, (bottom left) representative density, (right) local map resolutions.

[0113] FIGS. 46A-46E show structure of the ‘up’ state N165A mutant NTD shifts. A) Top view of the ‘up’ state N165A structure (green, cyan, and red) aligned to the unmutated spike (PDB ID 6VYB, grey). B) View of the ‘down’ adjacent RBD (green) and NTD (cyan) aligned to the unmutated spike (grey). C) View of the ‘down’ free RBD (red) and NTD (green) aligned to the unmutated spike (grey). D) View of the ‘up’ state RBD (cyan) and NTD (red) aligned to the unmutated spike (grey). E) Map view of the apical β-sheet motifs of the NTDs for the N165A ‘up’ state.

[0114] FIG. 47A-F. Vector based analysis of the 2P, N165A, and N234A C1 symmetry ‘down’ state 3D classification coordinates. A) The SARS-CoV-3 Spike depicting adjacent RBD, SD1, NTD, and NTD′ domains used in the domain and motif centroid based vector analysis. B) Cartoon representation of the RBD, SD1, NTD, and NTD′ domains used in the vector analysis depicting the vectors, angles, and dihedrals used in the analysis. Each Spike structure contains three RBD to NTD pairings for the analysis for each 2P, N165A, and N234A structure (4, 4, and 3 classes, respectively). C) The magnitudes of the vectors connecting adjacent RBDs and NTDs. D) The dihedral angle about the vector connecting SD1 to the NTD′. E) Principal components analysis of each vector dataset for each RBD-NTD pairing for the 2P (red), N165A (green), and N234A (blue) structures. Numbers indicate the class to which each pairing belongs. F) Alignment of each asymmetric structure with C3 symmetry score.

[0115] FIG. 48A-C. Structural comparison of the 2P and N165A C1 symmetry one ‘up’ state 3D classification results. A) The one ‘up’ state structural ensemble with a representative structure in bold. B) The dihedral angle about the SD1 to NTD′ vector. The boxed points indicate the dihedral for the bold structure in (A). C) Principal components analysis of each vector dataset for each RBD-NTD pairing for the 2P (red) and N165A (green) structures.

[0116] FIGS. 49A-B: Receptor binding domain and receptor interaction site of the SARS-CoV-2 Spike protein. A. Structure of the Spike trimer with each protomer colored as pink, cyan, and blue (PDB: 6VSB). One protomer has the receptor binding domain (RBD; blue) in the up conformation. The predominant interaction between the RBD and ACE-2 is highlighted in magenta. B. Magnified view of the superposition of the RBD in in the ACE-2 bound conformation (PDB: 6M17; yellow) onto the soluble Spike trimer (blue). The peptide within the receptor binding domain that interacts predominantly with the ACE2 receptor is highlighted in magenta.

[0117] FIGS. 50A-B Interaction of the SARS-CoV-2 Spike protein with its receptor ACE-2. A. The receptor binding domain of the Spike protein (yellow) is shown binding to its receptor, ACE-2 (cyan; PDB: 6M17). The predominant interaction between the RBD and ACE-2 is highlighted in magenta. B. This polypeptide is termed the receptor interaction site and can be the target of neutralizing antibodies aiming to prevent the interaction between the RBD and its receptor.

[0118] FIGS. 51A-C: Stabilization of soluble SARS CoV-2 Spike protein. A) Diagram of the SARS-CoV-2 full-length Spike (S) protein depicting the N-terminal domain (NTD), receptor binding domain (RBD), subdomains 1 and 2 (SD1 and SD2), heptad repeat 1 (HR1), heptad repeat 2 (HR2), and transmembrane domain (TM). Spike domains S1 and S2 are depicted below line diagram. B) Spike protein truncated to generate secreted protein. Spike protein trimers are stabilized by the introduction of K986P+V987P mutations (red PP). C) The same protein design as in B, but with additional D985C and S383C mutations (red “C” connected by lines). These two cysteines link together Spike domains to further stabilize Spike protein trimers. B) Upper: Diagram of the SARS-CoV-2 construct as in (A) with the addition of the RBD ‘down’ state stabilizing disulfide, D985C and S383C.

[0119] FIGS. 52A-E. SARS CoV-2 Spike nanoparticle immunogen designs. A) Diagram of the receptor binding domain of the Spike protein produced without the surrounding portions of the Spike protein. B) Diagram of the site within the receptor binding domain of the Spike protein that interacts with the virus receptor on host cells produced without the surrounding portions of the Spike protein. C-E) Attachment of the receptor interaction site (RIS), RBD, and truncated Spike protein to subunits of self-assembling protein nanoparticles to generate safe mimics of the virus.

[0120] FIG. 53A-D shows non-limiting embodiments of SARS-2 designs comprising various modifications. The modifications can be incorporated in full length sequences, or any other SARS-2 protein fragment. FIG. 53A-D discloses SEQ ID NOS 168-171, respectively, in order of appearance.

[0121] FIG. 54A-C show non-limiting embodiments of amino acid sequences of nCoV-1 nCoV-2P (54A), N165 mutant (54B) and N234 mutant (54C). Positions 165 and 234 are underlined. FIG. 54A-C discloses SEQ ID NOS 172-174, respectively, in order of appearance.

### DETAILED DESCRIPTION

[0122] The invention provides proteins and nucleic acids, including modified mRNAs which are stable and can be used as immunogens. Provided also are nucleic acids optionally designed as vectors, for example for recombinant expression and/or stable integration, e.g. but not limited, full-length S protein DNA encoding trimer for stable expression, or VLP incorporation.

[0123] Detailed descriptions of one or more preferred embodiments are provided herein. It is to be understood, however, that the present invention may be embodied in various forms. Therefore, specific details disclosed herein are not to be interpreted as limiting, but rather as a basis for the claims and as a representative basis for teaching one skilled in the art to employ the present invention in any appropriate manner.

[0124] The singular forms “a”, “an” and “the” include plural reference unless the context clearly dictates otherwise. The use of the word “a” or “an” when used in conjunction with the term “comprising” in the claims and/or the specification may mean “one,” but it is also consistent with the meaning of “one or more,” “at least one,” and “one or more than one.”

[0125] Wherever any of the phrases “for example,” “such as,” “including” and the like are used herein, the phrase “and without limitation” is understood to follow unless explicitly stated otherwise. Similarly, “an example,” “exemplary” and the like are understood to be nonlimiting.

[0126] The term “substantially” allows for deviations from the descriptor that do not negatively impact the intended purpose. Descriptive terms are understood to be modified by the term “substantially” even if the word “substantially” is not explicitly recited.

[0127] The terms “comprising” and “including” and “having” and “involving” (and similarly “comprises”, “includes,” “has,” and “involves”) and the like are used interchangeably and have the same meaning. Specifically, each of the terms is defined consistent with the common United States patent law definition of “comprising” and is therefore interpreted to be an open term meaning “at least the following,” and is also interpreted not to exclude additional features, limitations, aspects, etc. Thus, for example, “a process involving steps a, b, and c” means that the process includes at least steps a, b and c. Wherever the terms “a” or “an” are used, “one or more” is understood, unless such interpretation is nonsensical in context.

[0128] The term “about” is used herein to mean approximately, roughly, around, or in the region of. When the term “about” is used in conjunction with a numerical range, it modifies that range by extending the boundaries above and below the numerical values set forth. In general, the term “about” is used herein to modify a numerical value above and below the stated value by a variance of 20 percent up or down (higher or lower).

[0129] SARS-2 Coronavirus S Protein Designs

[0130] The ongoing global pandemic of the new SARS-CoV-2 coronavirus presents an urgent need for the development of effective preventative and treatment therapies. The viral-host cell fusion (S) protein spike is a prime target for such therapies owing to its critical role in the virus lifecycle. The S protein is divided into two regions: the N-terminal S1 domain that caps the C-terminal S2 fusion domain. Binding to host receptor via the Receptor Binding Domain (RBD) in S1 is followed by proteolytic cleavage of the spike by host proteases. Large conformational changes in the S-protein result in S1 shedding and exposure of the fusion machinery in S2. Class I fusion proteins such as the coronavirus (CoV) S protein that undergo large conformational changes during the fusion process must, by necessity, be highly flexible and dynamic. Indeed, cryo-EM structures of the SARS-CoV-2 (SARS-2) spike protein reveal considerable flexibility and dynamics in the S1 domain^{1,2}, especially around the RBD that exhibits two discrete conformational states—a “down” state that is shielded from receptor binding, and an “up” state that is receptor-accessible. We will use our robust, high-throughput computational and experimental pipeline to define the detailed trajectory of the “down” to “up” transition of the SARS-2 S protein, identify early metastable intermediates in the fusion pathway, and exploit their structures and dynamics for identifying drug and vaccine candidates that target SARS-2.

[0131] A wealth of structural information on CoV spike proteins, including recently determined cryo-EM structures of the SARS-2 spike¹⁻¹¹, provides a rich source of detailed data from which to begin precise examination of macromolecular transitions underlying triggering of this fusion machine. In certain aspects the invention provides that(a) analysis quantifying CoV S1 domain movements around which structurally conserved domains undergo rigid body motions, (b) in silico, prescreened panel of differentially domain position stabilizing mutations, and (c) integrated computational and experimental approach with unprecedented, dedicated access to >300 accelerated compute devices (GPUs), rapid and priority access to a K3 direct electron detector equipped Titan Krios electron microscope, and high-throughput structural determination pipeline. Together, this puts us in a unique position to provide atomically detailed mechanistic insight into the fusion mechanism of the SARS-2 virus. The scientific premise of this study is that understanding the structural dynamics and early transition kinetics of mobile regions of the SARS-2 spike will allow optimal control of vaccine and drug responses, and facilitate the development of new antiviral drugs and protective vaccines. The goal of this study is to define mechanistically-derived transition states of the pre-fusion SARS-2 spike that can be exploited for vaccine and drug design.

[0132] The invention is based on work to define domain motions in the pre-fusion SARS-2 spike. The idea is that while the RBD undergoes a dramatic “up” and “down” hinge motion, other subtle movements in the pre-fusion SARS-2 spike play an important role in defining antibody and ligand binding specificity. Analysis of CoV S protein structures revealed subtle shifts in S1 that make and break interactions with adjacent domains, resulting in multistate or disordered behavior of the RBD in its “down” position. Here, we identify a set of mutations that lock and stabilize the SARS-2 S protein with the RBD in discrete “down” positions, each with different but specific RBD positions rather than the usual multistate behavior observed in all CoV spike structures determined to date. Deploying rapid assays to assess protein expression, thermostability, and antigenicity, we will generate a set of stabilized SARS-2 spike variants with defined reactivity to patient-sera. We will determine high-resolution cryo-EM structures to define the metastable RBD “down” state orientations in these mutants, and use the combined experimental information from structures, biochemistry and biophysics to iterate the structure-guided computational design cycle.

[0133] The invention is based on work to define the trajectory of the transition between the “down” and “up” states of the SARS-2 S protein. The idea is that the SARS-2 S protein transitions through multiple metastable intermediate states between the known “down” and “up” states. Using an integrated approach, we will interrogate the mechanism by which the SARS-2 S protein transitions from its “down” state to the receptor-accessible “up” state. Our initial examination of the available CoV S protein structures quantifies specific rigid body domain movements within each state. Using a combination of path finding and adaptive sampling molecular dynamics (MD) simulation techniques, we will develop a theoretical model of this initial triggering event. Structural details from the putative path will be used to stabilize predicted intermediate states. Provided are experiments to study the biochemical and biophysical properties of these putative intermediates, and determine their structures using high-resolution cryo-EM. We will assess the reactivity of these structures to patient-sera and known SARS-2 spike ligands to define state antigenicity.

[0134] In certain aspects the invention provides methods to determined structures of multiple “down”, “up”, and intermediate states of the SARS-2 S protein. Given the current global health emergency we will prioritize rapid dissemination of results to the community. Importantly, we will make available coordinates from the experimentally refined transition ensemble determined via MD simulation to enable close examination of the presented transition by researchers in the fields of drug and vaccine design. Overall, these studies will provide atomically detailed structural and mechanistic information that can be exploited for vaccine and therapeutics design.

[0135] On Mar. 11, 2020, the World Health Organization (WHO) characterized the ongoing spread of COVID-19, a highly contagious respiratory disease caused by the new betacoronavirus SARS-CoV-2 (SARS-2), a pandemic. Originating in the Wuhan province of China, now spread to over 100 countries, the virus has infected >150,000 individuals and caused >8000 deaths world-wide. As the virus continues to spread, there is an urgent need to understand as much as possible, as rapidly as possible, about this new virus.

[0136] The transmembrane SARS-2 S protein spike trimer (FIG. 1) mediates attachment and fusion of the viral membrane with the host cell membrane and is therefore critical for the viral life cycle. Displayed on the surface of the virus, the S protein is a prime target for vaccine and therapeutics design.

[0137] The SARS-2 S protein displays striking structural similarities with the S proteins of the previously identified SARS-CoV, MERS-CoV, and other human and murine CoV viruses. However, most S-targeting antibodies to SARS and MERS do not cross-react with SARS-2. Conformational evasion is among the many host immune evasion tools available to viruses. Dramatic shifts in the conformational ensemble of states for CoVs have in fact been demonstrated^{1,2}. Therefore, a detailed understanding of structure and dynamics of the SARS-2 S protein in comparison to is orthologs will reveal how genetic drift can give rise to the large phenotypic differences that drive viral evolution and host immune evasion.

[0138] Thus, the urgent need to understand the SARS-2 virus that is responsible for the ongoing pandemic makes this study significant and relevant to public health.

[0139] Provided are studies that use an integrated structural biology approach to harness the latest innovations in high-throughput cryo-electron microscopy and computational methodologies to approach this urgent global healthcare problem. These studies include use of Titan Krios microscope fitted with a K3 camera for rapid determination of high-resolution structures, access to a Philips EM420 microscope, as well as to a Talos Arctica for cryo-screening and data collection at the National Institutes for Environmental Health Sciences (NIEHS), NIH.

[0140] Studies will be able to test immunogenicity in mice and rabbits of any promising SARS-2 spike variants generated in this study.

[0141] In non-limiting embodiments, aspects of the invention are based on the idea that protein dynamics impact its antigenic and immunogenic properties. Coronavirus designs are based on an integrated approach that closely couples structure and molecular dynamics-driven protein engineering with biophysical, biochemical, virological and immunological studies.

[0142] Conformationally distinct structural states of the CoV S-protein spike are well defined. The transmembrane CoV S protein spike trimer is composed of interleaved protomers that include an N-terminal receptor binding S1 domain and a C-terminal S2 domain that contains the fusion elements (FIG. 1).³ The S1 domain is subdivided into the N-terminal domain (NTD) followed by the receptor binding domain (RBD) and two structurally conserved subdomains (1 and 2). Together these domains cap the S2 domain, protecting the conserved fusion machinery. Several structures for a soluble ectodomain construct that retains the complete S1 domain and the surface-exposed S2 domain have been determined. These include SARS-2^{1,2}, SARS⁴⁻⁸, MERS^{4,9}, and other human^{3,10} and murine¹¹ beta-CoV spike proteins. These structures revealed the S-protein spike to be conformationally heterogenous, especially in the region of the RBD. Within a single protomer the RBD can adopt a closed, ‘down’ state (FIG. 1A), in which the RBD covers the apical region of the S2 protein near the C-terminus of the first histad repeat (HR1), or an open, ‘up’ state in which the RBD is dissociated from the apical central axis of S2 and the NTD (FIG. 1B). Cryo-EM structures consistently demonstrate a large degree of domain flexibility in both the ‘down’ and ‘up’ states in the NTD and RBD. While these structures have provided essential information for identifying the relative arrangement of these domains, little is understood regarding the fusogenic and antigenic consequences of instability in this region.

[0143] A detailed structural schematic defining the geometry and internal rearrangements of movable domains. An understanding of macromolecular structural dynamics requires a precise definition of structural states. Examination of the available SARS and MERS S-protein structures revealed: 1) the NTD, RBD, subdomains and internal S2 domains move as rigid bodies and 2) these domains display a remarkable array of relative shifts between the S1 region's domains and the S2 region's β-sheet motif and CD (FIG. 2). In order to quantify these movements, we have analyzed the relevant regions of motion and their structural disposition in all available CoV ectodomain spike structures including 15 SARS structures, 10 MERS structures, a HKU1 structure, an OC43 structure, a murine CoV structure, and the three recently released SARS-2 structures^{1,2}. Each protomer in those structures displaying asymmetric ‘up’/‘down’ RBD states was examined independently (76 structural states total). The NTD domain was split into a primary, N-terminal section and a secondary C-terminal section. The generally disordered, central segment of the RBD was not included in the analysis. A vector-based analysis similar to that used in our recent manuscript detailing motion in the HIV-1 Envelope protein¹² was applied here. Specifically, vectors connecting the region's c-α centroids were generated and used to define the relative dispositions of the domains. The vector magnitudes and select angles and dihedrals were used to identify the breadth of domain movements and compare between strains. The results indicate that CoV spike proteins in various strains differ markedly from one another and that considerable variability in the domain arrangements within strains exists, such as in the SARS ectodomains. These results revealed a large conformational space available to the CoV S-protein and indicated that subtle changes in inter-domain contacts can play a major role in shifting these distributions.

[0144] SARS-2 S Protein Production, Purification and Structural Characterization

[0145] The SARS-2 S protein ectodomain² was expressed in 293F cells and purified using published methods to yield ˜4 mg/L purified spike (FIG. 3). The SARS-2 S protein ectodomain described in Wrapp, D. et al. Cryo-EM structure of the 2019-nCoV spike in the prefusion conformation. Science 367, 1260-1263, doi:10.1126/science.abb2507 (2020) is incorporated herein by reference. The purified S protein was tested for binding to ACE-2 receptor using Surface Plasmon Resonance (SPR) (FIG. 3C). Negative Stain Electron Microscopy (NSEM) (FIG. 4) and preliminary cryo-EM (FIG. 5) studies were performed. 3D reconstruction for the SARS-2 spike from NSEM recapitulated the 1-RBD-up state that was visualized in the published high resolution cryo-EM structure^{1,2}. Our NSEM pipeline enables rapid and low-cost screening of a large number of constructs, and our high-throughput cryo-EM pipeline will allow us to solve high resolution structures of the SARS-2 S protein variants in this study. These results demonstrate that, within a relatively short period of a few weeks, we were able to adapt our protein production, biochemistry and structural biology platforms optimized for HIV-1 Env to the SARS-2 S protein, and that we now have all experimental systems setup to accomplish the goals of this project.

[0146] Advanced molecular simulation results for the SARS ectodomain spike indicate rapid exchange between metastable states. In order to examine the breadth and time scales of the dynamics of CoV spike protein structure, we initiated an adaptive sampling simulation of the symmetric all ‘down’, closed state of the SARS CoV soluble S-protein (PDB ID 6ACC⁶). To overcome the sampling problem in MD, the adaptive scheme periodically monitors multiple simultaneous simulations and launches additional simulations in regions of the coordinate space along transition paths. In this way, difficult to observe slow processes become accessible. In total, we obtained 539 independent 50 ns simulations totaling ˜27 μs of simulation time. Monitoring contacts between each protomer's RBD and their adjacent RBD, NTD, and HR1 C-terminus, we further projected the data using the time-lagged independent component analysis (TICA) approach. TICA components point in the direction of the slowest processes in the simulation data which means that transitions along the so call TICs can correspond to transitions between metastable states (FIG. 6A). Analysis of the implied timescale plot (ITS) indicate simulations extended to ˜100 ns will be sufficient to produce a converged Markov model with sufficient sampling (FIG. 6B). Examination of the structures of two representative kinetics states indicates a very tightly coupled RBD to RBD interactive state (FIG. 6C; upper). The breaking of the RBD-RBD contacts results in a highly dynamic ‘down’ dissociated state in which RBD to RBD contacts rapidly form and dissociate (FIG. 6C; lower). Indeed, vector analysis of these states demonstrated a marked difference in heterogeneity in the relevant structural regions between the two states (FIG. 6D). This leads us to identify a mechanism for closed to open transitions that will involve these previously unknown kinetic intermediates (FIG. 6E). These results indicate mutations in the RBD-RBD and RBD-NTD interface can alter the state's equilibrium distribution as well as their transition kinetics meaning point mutations in the SARS-2 S-protein can readily alter the conformational distribution of the protein and therefore its antigenicity.

[0147] In certain aspects the invention provides methods to define symmetric and asymmetric down state domain arrangements in the SARS-2 S protein. Our analysis of the available CoV S-protein structures reveals a wide breadth of conformational states. We therefore ask the following questions: 1) Is it possible to eliminate or markedly reduce S1 flexibility? 2) How does the stabilizing strategy affect distant domain arrangements? 3) The MERS spike domain arrangement is distinct from SARS and SARS- 2; is it possible to insert MERS residue substitutions in SARS-2 to induce this arrangement? 4) Does a change in domain arrangement impact ectodomain antigenicity? In order to answer these questions, we designed differentially stabilized the S-protein domains. To this end, we have screened in silico, using the Schrödinger software suite, a large panel of mutations designed to stabilize specific regions of the S-protein (FIG. 7; see FIG. 8 and Example 3). Using a high-throughput experimental screen, we down-selected mutations that stabilize each region. We will perform biochemical and biophysical analyses, followed by structural studies using NSEM (low cost, high throughout) and cryo-EM (high resolution). High resolution structures will elucidate the structural effect of the stabilization, and will indicate the degree to which the domains have shifted position, the extent to which the ‘up’/‘down’ RBD equilibrium has shifted, and will enable identification of epitope impacts. Screening of these fully characterized constructs for changes in patient sera antigenicity will then determine the extent to which shifting the conformational ensemble has affected antigenicity and will highlight potential vaccine immunogenicity impacts.

[0148] Approach and Methods:

[0149] Small-scale transfections of plasmids encoding the mutated S-protein (FIGS. 7 and 8) in HEK293F cells.

[0150] Testing of cell-culture supernatants for binding to 1) Streptavidin, in a biolayer interferometry (BLI)-based screen similar to that performed in our recent HIV-1 stabilization manuscript¹², to determine expression levels and 2) to the ACE-2 receptor, and other RBD-reactive ligands such as antibodies CR3022 and 47D11 ¹³⁻¹⁶, that will report on the disposition of the RBD within the spike. Supernatants from untransfected cells will be used as control.

[0151] Constructs showing optimal expression and certainACE-2 binding phenotypes will be purified using the PureSpeed (Mettler Toledo) IMAC based high-throughput purification system.

[0152] Purified proteins will then be characterized using SDS-PAGE, western blotting, rapid fluorescence-based thermostability assays ¹⁷⁻¹⁹ size exclusion chromatography (SEC) and NSEM.

[0153] Constructs with confirmed expression of the trimeric spike protein (SDS-PAGE, SEC and NSEM), and improved properties, e.g. but not limited to melting temperature at least 5° C. higher than the unmutated construct, will be selected as candidates for the next round of selection. For these constructs we will determine 1) ACE2 binding and affinity, 2) thermal stability via differential scanning calorimetry, and 3) high-resolution structures via cryo-EM. Collecting large cryo-EM datasets of at least 2 million particles for each mutated construct will allow heterogenous 3D classification. We will compare the structures with that of the unmutated construct, determining changes in residue-residue contacts, epitope shape and accessibility, shifts in the probability of finding the construct in any particular state, and measures of conformational shifts using our vector-based analysis.

[0154] Finally, we will test for differential changes in antigenicity of these constructs using sera from infected patient. This will provide selection criteria for subsequent studies.

[0155] Constructs will also be tested for immunogenicity in any suitable animal model, including without limitation mouse studies, NHP studies, and so forth.

[0156] Small-scale transfections can yield relatively small quantities of protein for some constructs. NSEM and fluorescence-based thermostability measurements require very small amount of protein (less than 10 μg), increasing the chances that most of the constructs will yield sufficient protein for the small-scale screens. For those constructs that do not, we will use a larger transfection volume. The ones that fail to express we will remove from our list. Structural determination by cryo-EM also requires very small amounts of protein thus ensuring for most constructs we will be able to obtain high resolution feedback on the designs. 2. Failed designs: Some of the designs may not show expected phenotypes, a risk inherent in this type approach. The large number of in silico designs we are starting with along with the high throughput assays, can allow us to quickly select the designs that show promise and rapidly iterate the experimental and design cycles. This approach has been successful in structure-guided vaccine design^{20,21}. If a particular set fail to provide a stabilized construct, we will turn to the high-resolution cryo-EM structures determined in our heterogenous refinement of the unmutated construct to initiate additional design iterations.

[0157] At the successful conclusion of this study, without wishing to be bound by theory, we will provide a detailed, high-resolution mapping of conformational states occupied by the SAR-2 S-protein and shifts in conformational distribution with changes in domain interface interactions. Further, we will demonstrate the degree to which changes in the conformational distribution alter S-protein antigenicity. These results will provide a framework from which to consider how genetic drift in the SARS-2 can affect the spread of the disease and how containment by vaccination can be affected by the selection of conformationally varying mutants.

[0158] In certain aspects the invention provides methods to define, in atomic detail, the transition between the down and up states of the SARS-2 S protein spike. While the HIV-1 Env utilizes a complex network of allosteric machinery to signal receptor binding, the CoV S protein appears to use a kinetic strategy toward receptor recognition and triggering (FIG. 6E). The receptor binding site is buried in the closed, all RBD ‘down’ state, and initial receptor interactions can be governed by the probability of encountering an ‘up’ state RBD. In the absence of a robust allosteric network, further receptor binding can be governed by the probability of an additional RBD transitioning to the ‘up’ state. Thus, a purely equilibrium perspective of the states can miss important physical characteristics of the transitions and limit a robust, predictive framework from which to understand and exploit structural data. To this end, we will monitor the exchange dynamics of domain repositioning in the SARS-2 spike ectodomain using adaptive sampling. Accumulating simulated data on the order of hundreds of thousands of microseconds, we will stitch together the resulting dynamics using proven Markov state modelling approaches^{22,23}. We will then identify key, as yet undetermined, long-lived transition states for structural interrogation by high-resolution cryo-EM. Combining an advanced framework for simulating the SARS-2 spike ectodomain along with high-resolution cryo-EM structures, will provide a robust, validated model for the conformational transitions.

[0159] Approach and Methods:

[0160] An in-house developed projection method calculating the pairwise relative angles between the NTD, NTD′, RBD, subdomains 1 and 2, the S2-sheet motif, and the CD of each protomer will used in the adaptive scheme.

[0161] Converged Markov model transition intermediates will be used as “bait” to isolate minor populations of intermediates by heterogenous classification of cryo-EM data

[0162] These MD based particle sets will be unbiased via independent ab initio map reconstruction and subsequent high-resolution refinement for comparison against the MD state.

[0163] The equilibrium distribution of states determined by cryo-EM will be compared to the MD predicted equilibrium. Upon validation, we will analyze the MD transition kinetics, thermodynamics, and path(s).

[0164] All atom simulations will be carried out using HTMD²⁴ and Amberz18²⁵ for the adaptive sampling protocol. The Amber ﬀ14SB²⁶ and Glycam²⁷ forcefields using a truncated octahedral TIP3P²⁸ water box and a time-step of 4 fs using hydrogen mass repartitioning²⁹ in the NVT ensemble will be used throughout for production runs. Simulations will be lengthened and the number of iterations increased if model validation demonstrate a need. Markov models will be built using the PyEMMA²² software package. Markov model convergence will be monitored based upon linearity in the implied timescale plots and the Chapman-Kolmogorov test and uncertainty will be determined via bootstrapping of the simulated data.

[0165] As blind sampling of the adaptive states can lead to significant simulation time spent in irrelevant states, we will use the FAST′ algorithm to focus sampling in the direction of the known open, ‘up’ state. Due to the size and complexity of the CoV structure, a divide and conquer approach toward simulating the opening process can be necessary. We will split the approach into several distinct modelling steps via a combination of proven approaches³¹⁻³³ as needed. The coordinate projection method and the Markov model lag time must be optimized as well. We will test multiple projection methods and compare using the so-called VAMP scoring criteria³⁴. Finally, if inconsistencies between the simulated and experimental results arise our path forward will involve a sequential shift toward relying upon the experimental data to drive the description of the transition. Even if the model rates and equilibrium values disagree with the cryo-EM data we will still be able to discern possible paths and identify mutations that affect the distribution. Determination of transition kinetics via ACE2 binding, thermal melting temperatures, and cryo-EM state distributions can instead be used to define the transition while still retaining the utility of the MD approach.

[0166] These studies can provide key details important for understanding the transition from the prefusion, closed to the post fusion open structures of the SARS-2 fusion protein. This will include a detailed description of metastable intermediate states, transition states, transition kinetics, and transition free energies. This mechanism will be supported by high-resolution structures. Together, this information will provide atomic details important for both drug and vaccine design as well as in the prediction of conformational evasion mutations in the evolving SARS-2 virus.

### REFERENCES

[0167] 1 Walls, A. C. et al. Structure, Function, and Antigenicity of the SARS-CoV-2 Spike Glycoprotein. Cell, doi: doi.org/10.1016/j.cell.2020.02.058 (2020).
[0168] 2 Wrapp, D. et al. Cryo-EM structure of the 2019-nCoV spike in the prefusion conformation. Science 367, 1260-1263, doi:10.1126/science.abb2507 (2020).
[0169] 3 Kirchdoerfer, R. N. et al. Pre-fusion structure of a human coronavirus spike protein. Nature 531, 118-121, doi:10.1038/nature17200 (2016).
[0170] 4 Yuan, Y. et al. Cryo-EM structures of MERS-CoV and SARS-CoV spike glycoproteins reveal the dynamic receptor binding domains. Nature Communications 8, 15092, doi:10.1038/ncomms15092 (2017).
[0171] 5 Gui, M. et al. Cryo-electron microscopy structures of the SARS-CoV spike glycoprotein reveal a prerequisite conformational state for receptor binding. Cell Research 27, 119-129, doi:10.1038/cr.2016.152 (2017).
[0172] 6 Song, W., Gui, M., Wang, X. & Xiang, Y. Cryo-EM structure of the SARS coronavirus spike glycoprotein in complex with its host cell receptor ACE2. PLOS Pathogens 14, e1007236, doi:10.1371/journal.ppat.1007236 (2018).
[0173] 7 Kirchdoerfer, R. N. et al. Stabilized coronavirus spikes are resistant to conformational changes induced by receptor recognition or proteolysis. Scientific Reports 8, 15701, doi:10.1038/s41598-018-34171-7 (2018).
[0174] 8 Walls, A. C. et al. Unexpected Receptor Functional Mimicry Elucidates Activation of Coronavirus Fusion. Cell 176, 1026-1039.e1015, doi:https://doi.org/10.1016/j.cell.2018.12.028 (2019).
[0175] 9 Pallesen, J. et al. Immunogenicity and structures of a rationally designed prefusion MERS-CoV spike antigen. Proceedings of the National Academy of Sciences 114, E7348, doi:10.1073/pnas.1707304114 (2017).
[0176] 10 Tortorici, M. A. et al. Structural basis for human coronavirus attachment to sialic acid receptors. Nature Structural & Molecular Biology 26, 481-489, doi:10.1038/s41594-019-0233-y (2019).
[0177] 11 Walls, A. C. et al. Cryo-electron microscopy structure of a coronavirus spike glycoprotein trimer. Nature 531, 114-117, doi:10.1038/nature16988 (2016).
[0178] 12 Henderson, R. et al. Disruption of the HIV-1 Envelope allosteric network blocks CD4-induced rearrangements. Nature Communications 11, 520, doi:10.1038/s41467-019-14196-w (2020).
[0179] 13 Hodgson, J. The pandemic pipeline. Nature Biotechnology (2020).
[0180] 14 Wang, C. e. a. A human monoclonal antibody blocking SARS-CoV-2 infection. bioRxiv doi: doi.org/10.1101/2020.03.11.987958 (2020).
[0181] 15 ter Meulen, J. et al. Human monoclonal antibody combination against SARS coronavirus: synergy and coverage of escape mutants. PLoS Med 3, e237, doi:10.1371/journal.pmed.0030237 (2006).
[0182] 16 Tian, X. et al. Potent binding of 2019 novel coronavirus spike protein by a SARS coronavirus-specific human monoclonal antibody. Emerg Microbes Infect 9, 382-385, doi:10.1080/22221751.2020.1729069 (2020).
[0183] 17 Nilsen, J. et al. Human and mouse albumin bind their respective neonatal Fc receptors differently. Sci Rep 8, 14648, doi:10.1038/s41598-018-32817-0 (2018).
[0184] 18 Hendus-Altenburger, R. et al. Molecular basis for the binding and selective dephosphorylation of Na(+)/H(+) exchanger 1 by calcineurin. Nat Commun 10, 3489, doi:10.1038/s41467-019-11391-7 (2019).
[0185] 19 Nosrati, M. et al. Functionally critical residues in the aminoglycoside resistance-associated methyltransferase RmtC play distinct roles in 30S substrate recognition. J Biol Chem 294, 17642-17653, doi:10.1074/jbc.RA119.011181 (2019).
[0186] 20 McLellan, J. S. et al. Structure-based design of a fusion glycoprotein vaccine for respiratory syncytial virus. Science 342, 592-598, doi:10.1126/science.1243283 (2013).
[0187] 21 Kwon, Y. D. et al. Crystal structure, conformational fixation and entry-related interactions of mature ligand-free HIV-1 Env. Nat Struct Mol Biol 22, 522-531, doi:10.1038/nsmb.3051 (2015).
[0188] 22 Scherer, M. K. et al. PyEMMA 2: A Software Package for Estimation, Validation, and Analysis of Markov Models. Journal of Chemical Theory and Computation 11, 5525-5542, doi:10.1021/acs.jctc.5b00743 (2015).
[0189] 23 Chodera, J. D. & Noe, F. Markov state models of biomolecular conformational dynamics. Current Opinion in Structural Biology 25, 135-144, doi:doi.org/10.1016/j.sbi.2014.04.002 (2014).
[0190] 24 Doerr, S., Harvey, M. J., Noe, F. & De Fabritiis, G. HTMD: High-Throughput Molecular Dynamics for Molecular Discovery. Journal of Chemical Theory and Computation 12, 1845-1852, doi:10.1021/acs.jctc.6b00049 (2016).
[0191] 25 D. A. Case, D. S. C., T. E. Cheatham, I I I, T. A. Darden, R. E. Duke, T. J. Giese, H. Gohlke, A. W. Goetz, D. Greene, N. Homeyer, S. Izadi, A. Kovalenko, T. S. Lee, S. LeGrand, P. Li, C. Lin, J. Liu, T. Luchko, R. Luo, D. Mermelstein, K. M. Merz, G. Monard, H. Nguyen, I. Omelyan, A. Onufriev, F. Pan, R. Qi, D. R. Roe, A. Roitberg, C. Sagui, C. L. Simmerling, W. M. Botello-Smith, J. Swails, R. C. Walker, J. Wang, R. M. Wolf, X. Wu, L. Xiao, D. M. York and P. A. Kollman. (2017).
[0192] 26 Maier, J. A. et al. ﬀ14SB: Improving the Accuracy of Protein Side Chain and Backbone Parameters from ﬀ99SB. Journal of Chemical Theory and Computation 11, 3696-3713, doi:10.1021/acs.jctc.5b00255 (2015).
[0193] 27 Kirschner, K. N. et al. GLYCAM06: a generalizable biomolecular force field. Carbohydrates. Journal of computational chemistry 29, 622-655, doi:10.1002/jcc.20820 (2008).
[0194] 28 Jorgensen, W. L., Chandrasekhar, J., Madura, J. D., Impey, R. W. & Klein, M. L. Comparison of simple potential functions for simulating liquid water. The Journal of Chemical Physics 79, 926-935, doi:10.1063/1.445869 (1983).
[0195] 29 Hopkins, C. W., Le Grand, S., Walker, R. C. & Roitberg, A. E. Long-Time-Step Molecular Dynamics through Hydrogen Mass Repartitioning. Journal of Chemical Theory and Computation 11, 1864-1874, doi:10.1021/ct5010406 (2015).
[0196] 30 Zimmerman, M. I. & Bowman, G. R. FAST Conformational Searches by Balancing Exploration/Exploitation Trade-Offs. Journal of Chemical Theory and Computation 11, 5747-5757, doi:10.1021/acs.jctc.5b00737 (2015).
[0197] 31 Moradi, M. & Tajkhorshid, E. Computational Recipe for Efficient Description of Large-Scale Conformational Changes in Biomolecular Systems. Journal of Chemical Theory and Computation 10, 2866-2880, doi:10.1021/ct5002285 (2014).
[0198] 32 Wang, W., Cao, S., Zhu, L. & Huang, X. Constructing Markov State Models to elucidate the functional conformational changes of complex biomolecules. WIREs Computational Molecular Science 8, e1343, doi:10.1002/wcms.1343 (2018).
[0199] 33 Singharoy, A. & Chipot, C. Methodology for the Simulation of Molecular Motors at Different Scales. The Journal of Physical Chemistry B 121, 3502-3514, doi:10.1021/acs.jpcb.6b09350 (2017).
[0200] 34 Mardt, A., Pasquali, L., Wu, H. & Noe, F. VAMPnets for deep learning of molecular kinetics. Nature Communications 9, 5, doi:10.1038/s41467-017-02388-1 (2018).

[0201] The SARS-2 S protein includes the receptor binding domain and is a target for neutralizing antibodies. We have designed recombinant DNA constructs that express SARS-2 coronavirus S protein (GenBank Accession number: YP_009724390.1, which is incorporated by reference) as the full-length, transmembrane S protein or a truncated version of the S protein that lacks the C-terminal transmembrane domain and cytoplasmic tail. The truncated S protein is secreted from expressing cells, whereas the full-length version of the plasmid is expressed on the cell surface. Additional SARS-2 S protein sequences from circulating viruses are found in the GISAID EpiFlu™ Database. These sequences can also be modified with any of the modifications described herein.

[0202] The S protein designs have several modifications from the wildtype reference sequence from GenBank. First, the SARS-2 protein sequence encodes furin cleavage sites and a cathepsin L cleavage site. The recombinant protein will be made with and without these protease cleavage sites to see if they affect protein quality, yield, and immunogenicity. Second, the natural signal peptide that directs intracellular trafficking of the S protein will be exchanged for the bovine prolactin signal peptide. The bovine prolactin signal peptide is a strong signal peptide that directs proteins into the secretory pathway. This signal peptide is predicted by the SignalP 5.0 program to be cleaved off of the mature S protein more efficiently than the natural virus signal peptide sequence. Third, the secreted S protein can trimerize in order to resemble the native, membrane-bound S protein on coronavirus virions. However, the truncated, secreted S protein lacks the transmembrane domain and thus may not form a stable trimeric protein. To facilitate trimerization, we added a trimerization domain to the C-terminus of some truncated S proteins. The trimerization domain can be a 29 amino acid sequence called foldon for T4 bacteriophage fibritin protein (Strelkov S V et al. Biochemistry. 1999; Frank S et al. J Mol Biol. 2001). Fourth, we have encoded de novo cysteines to the protein sequence to create new intramolecular and intermolecular disulfide bonds. The bonds prevent conformational changes within the S protein. Non-limiting examples are represented by Cluster modifications 1-11. Fifth, we have encoded two new prolines in between HR1 and the central helix in the S protein to stabilize the polypeptide turns in the S2 protein (Pallesen et al. PNAS. 2017). Sixth, we have added an AviTag to the truncated S proteins to facilitate functionalization by streptavidin binding.

[0203] For development as a vaccine immunogen, we have also created multimeric nanoparticles that display SARS-CoV-2 S protein on their surface. The rationale for creating such immunogens is that presenting multiple copies of the immunogen allows for a more avid interaction between the immunogen and naïve B cell receptors during the immune response. Thus, weak affinity interactions between the B cell receptor and immunogen are enhanced due to the multiple interactions that work in concert. This improved interaction with B cells can underlies the improved uptake of multimeric immunogens by B cells. The internalized immunogen is then presented to T cells in the context of MHC molecules. The T cells in turn provide the required costimulatory signals to the B cells to promote B cell maturation. Additionally, the SARS-CoV-2 S protein has 22 glycosylation sites, which can interact with lectins to facilitate trafficking to secondary lymphoid organs. Multimerization of viral spike glycoproteins improves their interaction with mannose binding lectin, thereby increasing antigen trafficking to sites with abundant immune cells.

[0204] The nanoparticle immunogens are composed of various fragments of SARS-CoV-2 S protein and self-assembling ferritin protein derived from Helicobacter pylori. Each nanoparticle displays 24 copies of the S protein on its surface. The S protein is displayed as a soluble spike trimer that has the transmembrane domain and cytoplasmic tail removed and a foldon trimerization domain added. To focus antibodies to neutralizing targets, the S protein will be truncated down to only the receptor binding domain (RBD), which is a known target for neutralizing antibodies. This construct has the potential to generate neutralizing antibodies, while not eliciting binding antibodies to other sites that mediate antibody-dependent enhancement of virus infectivity (Wang et al. Biochem Biophys Res Commun. 2014 Aug. 22; 451(2):208-14; Jaume et al. J Virol. 2011 October; 85(20):10582-97).

[0205] Nucleic Acid Sequences

[0206] In certain aspects, the invention provides nucleic acids comprising sequences encoding proteins of the invention. In certain embodiments, the nucleic acids are DNAs. In certain embodiments, the nucleic acids are mRNAs. In certain aspects, the invention provides expression vectors comprising the nucleic acids of the invention.

[0207] In certain aspects, the invention provides a pharmaceutical composition comprising mRNAs encoding the inventive antibodies. In certain embodiments, these are optionally formulated in lipid nanoparticles (LNPs) or liposomes. In certain embodiments, the mRNAs are modified. Modifications include without limitations modified ribonucleotides, poly-A tail, and/or 5′ cap.

[0208] In certain aspects the invention provides nucleic acids encoding the inventive protein designs. In non-limiting embodiments, the nucleic acids are mRNA, modified or unmodified, suitable for use any use, e.g but not limited to use as pharmaceutical compositions. In certain embodiments, the nucleic acids are formulated in lipid, such as but not limited to LNPs or liposomes.

[0209] In some embodiments the antibodies are administered as nucleic acids, including but not limited to mRNAs which can be modified and/or unmodified. See US Pub 20180028645A1, US Pub 20170369532, US Pub 20090286852, US Pub 20130111615, US Pub 20130197068, US Pub 20130261172, US Pub 20150038558, US Pub 20160032316, US Pub 20170043037, US Pub 20170327842, US Pub 20180344838A1 at least at paragraphs [0260]-[0281] for non-limiting embodiments of chemical modifications, wherein the content of each is incorporated by reference in its entirety.

[0210] mRNAs delivered in LNP formulations have advantages over non-LNPs formulations. See US Pub 20180028645A1.

[0211] In certain embodiments the nucleic acid encoding a protein is operably linked to a promoter inserted an expression vector. In certain aspects the compositions comprise a suitable carrier. In certain aspects the compositions comprise a suitable adjuvant.

[0212] In certain aspects the invention provides an expression vector comprising any of the nucleic acid sequences of the invention, wherein the nucleic acid is operably linked to a promoter. In certain aspects the invention provides an expression vector comprising a nucleic acid sequence encoding any of the polypeptides of the invention, wherein the nucleic acid is operably linked to a promoter. In certain embodiments, the nucleic acids are codon optimized for expression in a mammalian cell, in vivo or in vitro. In certain aspects the invention provides nucleic acids comprising any one of the nucleic acid sequences of invention. In certain aspects the invention provides nucleic acids consisting essentially of any one of the nucleic acid sequences of invention. In certain aspects the invention provides nucleic acids consisting of any one of the nucleic acid sequences of invention. In certain embodiments the nucleic acid of the invention, is operably linked to a promoter and is inserted in an expression vector. In certain aspects the invention provides an immunogenic composition comprising the expression vector.

[0213] In certain aspects the invention provides a composition comprising at least one of the nucleic acid sequences of the invention. In certain aspects the invention provides a composition comprising any one of the nucleic acid sequences of invention. In certain aspects the invention provides a composition comprising at least one nucleic acid sequence encoding any one of the polypeptides of the invention.

[0214] In one embodiment, the nucleic acid is an RNA molecule. In one embodiment, the RNA molecule is transcribed from a DNA sequence described herein. In some embodiments, the RNA molecule is encoded by one of the inventive sequences. In another embodiment, the nucleotide sequence comprises an RNA sequence transcribed by a DNA sequence encoding the polypeptide sequences described herein, or a variant thereof or a fragment thereof. Accordingly, in one embodiment, the invention provides an RNA molecule encoding one or more of inventive antibodies. The RNA can be plus-stranded. Accordingly, in some embodiments, the RNA molecule can be translated by cells without needing any intervening replication steps such as reverse transcription.

[0215] In some embodiments, an RNA molecule of the invention can have a 5′ cap (e.g. but not limited to a 7-methylguanosine, 7mG(5′)ppp(5′)NlmpNp). This cap can enhance in vivo translation of the RNA. The 5′ nucleotide of an RNA molecule useful with the invention can have a 5′ triphosphate group. In a capped RNA this can be linked to a 7-methylguanosine via a 5′-to-5′ bridge. An RNA molecule may have a 3′ poly-A tail. It can also include a poly-A polymerase recognition sequence (e.g. AAUAAA) near its 3′ end. In some embodiments, a RNA molecule useful with the invention can be single-stranded. In some embodiments, a RNA molecule useful with the invention can comprise synthetic RNA.

[0216] The recombinant nucleic acid sequence can be an optimized nucleic acid sequence. Such optimization can increase or alter the immunogenicity of the protein. Optimization can also improve transcription and/or translation. Optimization can include one or more of the following: low GC content leader sequence to increase transcription; mRNA stability and codon optimization; addition of a kozak sequence (e.g., GCC ACC) for increased translation; addition of an immunoglobulin (Ig) leader sequence encoding a signal peptide; and eliminating to the extent possible cis-acting sequence motifs (i.e., internal TATA boxes).

[0217] Methods for in vitro transfection of mRNA and detection of protein expression are known in the art.

[0218] Methods for expression and immunogenicity determination of nucleic acid encoded proteins are known in the art.

[0219] A non-limiting embodiment of a neutralization assay is described in Zhao, G., Du, L., Ma, C. et al. A safe and convenient pseudovirus-based inhibition assay to detect neutralizing antibodies and screen for viral entry inhibitors against the new human coronavirus MERS-CoV. Virol J 10, 266 (2013). doi.org/10.1186/1743-422X-10-266, which content is incorporated by reference in its entirety. This assay can be adapted for use for SARS CoV-2.

[0220] Non-limiting embodiments of determining antibody responses are described in the following publication: “SARS-CoV-2 specific antibody responses in COVID-19 patients” Okba et al. doi.org/10.1101/2020.03.18.20038059. See also US Patent Publication 20200061185 which is incorporated by reference in its entirety.

[0221] Non-limiting embodiments of various assays, reagents, and technologies for evaluating the immunogens of the invention are described in Muthumani et al. Science Translational Medicine 19 Aug. 2015: Vol. 7, Issue 301, pp. 301ra132, DOI: 10.1126/scitranslmed.aac7462. The assays, reagents, and techniques can be adapted for use for SARS CoV-2.

[0222] Recombinant protein production of coronavirus proteins is known. See e.g. in US Patent Pub 20200061185 which disclosure is incorporated by reference in its entirety.

[0223] In some embodiments the SARS-2 S proteins of the invention are in a trimeric configuration. In some embodiments the SARS-2 S proteins of the invention are expressed as protomers which form trimers. These designs can comprise any suitable trimerization domain.

[0224] Non-limiting examples of exogenous multimerization domains that promote stable trimers of soluble recombinant proteins include: the GCN4 leucine zipper (Harbury et al. 1993 Science 262:1401-1407), the trimerization motif from the lung surfactant protein (Hoppe et al. 1994 FEBS Lett 344:191-195), collagen (McAlinden et al. 2003 J Biol Chem 278:42200-42207), and the phage T4 fibritin Foldon (Miroshnikov et al. 1998 Protein Eng 11:329-414), any of which can be linked to a recombinant coronavirus (e.g. SARS-2) S protein ectodomain described herein (e.g., by linkage to the C-terminus of S2) to promote trimerization of the recombinant coronavirus (e.g. SARS-2) S protein ectodomain.

[0225] In some examples, the C-terminus of the S2 subunit of the SARS-2 S protein ectodomain can be linked to a T4 fibritin Foldon domain. In specific examples, the T4 fibritin Foldon domain can include the amino acid sequence GYIPEAPRDGQAYVRKDGEWVLLSTF (SEQ ID NO: 1), which adopts a .beta.-propeller conformation, and can fold and trimerize in an autonomous way (Tao et al. 1997 Structure 5:789-798). Optionally, the heterologous trimerization is connected to the recombinant coronavirus (e.g. SARS-2) S protein ectodomain via a peptide linker, such as an amino acid linker. Non-limiting examples of peptide linkers that can be used include glycine, serine, and glycine-serine linkers.

[0226] In some embodiments, the SARS-2 spike protein ectodomain trimer can be membrane anchored, for example, for embodiments where the coronavirus (e.g. SARS-2) S protein ectodomain trimer is expressed on an attenuated viral vaccine, or a virus like particle. In such embodiments, the protomers in the trimer can each comprise a C-terminal linkage to a transmembrane domain, such as the transmembrane domain (and optionally the cytosolic tail) of the corresponding coronavirus. For example, the protomers of a disclosed SARS-2 S protein ectodomain trimer can be linked to a SARS-2 S protein transmembrane and cytosolic tail. In some embodiments, one or more peptide linkers (such as a gly-ser linker, for example, a 10 amino acid glycine-serine peptide linker can be used to link the recombinant SARS-2 S protein ectodomain protomer to the transmembrane domain.

[0227] The protomers linked to the transmembrane domain can include any of the modifications provided herein (or combinations thereof) as long as the recombinant coronavirus (e.g. SARS-2) S protein ectodomain trimer formed from the protomers linked to the transmembrane domain retains certain properties (e.g., the coronavirus S protein prefusion conformation).

[0228] The inventive protein or fragments thereof can be produced using recombinant techniques, or chemically or enzymatically synthesized.

[0229] In some embodiments a protein nanoparticle is provided that includes one or more of the disclosed recombinant SARS-2 S proteins, including but not limited to SARS-2 S protein trimers. Non-limiting example of nanoparticles include ferritin nanoparticles, encapsulin nanoparticles, Sulfur Oxygenase Reductase (SOR) nanoparticles, and lumazine synthase nanoparticles, which are comprised of an assembly of monomeric subunits including ferritin proteins, encapsulin proteins, SOR proteins, and lumazine synthase, respectively. Additional protein nanoparticle structures are described by Heinze et al., J Phys Chem B., 120(26):5945-52, 2016; Hsia et al., Nature, 535(7610):136-9, 2016; and King et al., Nature, 510(7503):103-8, 2014; each of which is incorporated by reference herein. To construct such protein nanoparticles a protomer of the SARS-2 S protein ectodomain trimer can be linked to a subunit of the protein nanoparticle (such as a ferritin protein, an encapsulin protein, a SOR protein, or a lumazine synthase protein) and expressed in cells under appropriate conditions. The fusion protein self-assembles into a nanoparticle and can be purified.

[0230] In some embodiments, a protomer of a disclosed recombinant SARS-2 S protein ectodomain trimer can be linked to a ferritin subunit to construct a ferritin nanoparticle. Ferritin nanoparticles and their use for immunization purposes (e.g., for immunization against influenza antigens) have been disclosed in the art (see, e.g., Kanekiyo et al., Nature, 499:102-106, 2013, incorporated by reference herein in its entirety). Ferritin is a globular protein that is found in all animals, bacteria, and plants, and which acts primarily to control the rate and location of polynuclear Fe(III)₂O₃ formation through the transportation of hydrated iron ions and protons to and from a mineralized core. The globular form of the ferritin nanoparticle is made up of monomeric subunits, which are polypeptides having a molecule weight of approximately 17-20 kDa. In certain embodiments, the modified coronavirus spike protein or the portion thereof is linked to form a protein multimerizing/nanoparticle subunit by a peptide linker in a sortase reaction, or is directly linked to the protein multimerizing/nanoparticle subunit. In certain embodiments, the protein nanoparticle subunit is a ferritin nanoparticle subunit.

[0231] In non-limiting embodiments the multimeric complexes comprising a ferritin sequence are designed and are assembled via sortase reaction. In non-limiting embodiments the multimeric complexes comprise encapsulin.

[0232] Following production, these monomeric subunit proteins self-assemble into the globular ferritin protein. Thus, the globular form of ferritin comprises 24 monomeric, subunit proteins, and has a capsid-like structure having 432 symmetry. Methods of constructing ferritin nanoparticles are known to the person of ordinary skill in the art and are further described herein (see, e.g., Zhang, Int. J. Mol. Sci., 12:5406-5421, 2011, which is incorporated herein by reference in its entirety).

[0233] In non-specific examples, the ferritin polypeptide is E. coli ferritin, Helicobacter pylori ferritin, human light chain ferritin, bullfrog ferritin or a hybrid thereof, such as E. coli-human hybrid ferritin, E. coli-bullfrog hybrid ferritin, or human-bullfrog hybrid ferritin. Exemplary amino acid sequences of ferritin polypeptides and nucleic acid sequences encoding ferritin polypeptides for use to make a ferritin nanoparticle including a recombinant SARS-2 S protein can be found in GENBANK, for example at accession numbers ZP_03085328, ZP_06990637, EJB64322.1, AAA35832, NP 000137 AAA49532, AAA49525, AAA49524 and AAA49523, which are specifically incorporated by reference herein in their entirety. In some embodiments, a recombinant protein of the invention can be linked to a ferritin subunit to form a nanoparticle.

[0234] Polynucleotides encoding a protomer of any of the disclosed recombinant proteins are also provided. These polynucleotides include DNA, cDNA and RNA sequences which encode the protomer, as well as vectors including the DNA, cDNA and RNA sequences, such as a DNA or RNA vector used for immunization. The genetic code to construct a variety of functionally equivalent nucleic acids, such as nucleic acids which differ in sequence but which encode the same protein sequence, or encode a conjugate or fusion protein including the nucleic acid sequence.

[0235] Another approach to multimerize expression constructs uses staphylococcus Sortase A transpeptidase ligation to conjugate inventive spike ectodomain trimers or spike subunits, for e.g. but not limited to cholesterol or self multimerizing protein. The trimers can be embedded into liposomes via the conjugated cholesterol.

[0236] To conjugate the trimer a C-terminal LPXTG tag (SEQ ID NO: 2) or a N-terminal pentaglycine repeat tag is added to the spike trimer gene, where X signifies any amino acid, such as Ala, Ser, Glu. Cholesterol is also synthesized with these two tags. Sortase A is then used to covalently bond the tagged spike subunit to the cholesterol. The sortase A-tagged spike trimer protein or portion thereof can also be used to conjugate the trimer to other peptides, proteins, or fluorescent labels. In non-limiting embodiments, the sortase A tagged trimers or spike portions are conjugated to ferritin to form nanoparticles.

[0237] In several embodiments, the nucleic acid molecule encodes a precursor of the protomer, that, when expressed in an appropriate cell, is processed into a recombinant SARS-2 S protein protomer that can self-assemble into the corresponding recombinant trimer. For example, the nucleic acid molecule can encode a recombinant SARS-2 S protein ectodomain including a N-terminal signal sequence for entry into the cellular secretory system that is proteolytically cleaved in the during processing of the recombinant protein in the cell. Recombinant proteins with different signal peptide sequences are embodied by the invention.

[0238] In certain embodiments, amino acid sequences of the invention described herein comprise a signal peptide. A skilled artisan can readily determine the signal peptide sequences. Signal peptide sequences can be removed during recombinant production of proteins. In non-limiting embodiments, provided are amino acid sequences of recombinant proteins which do not include amino acids of comprising a signal peptide.

[0239] In some embodiments, the nucleic acid molecule encodes a precursor SARS-2 S polypeptide that, when expressed in an appropriate cell, is processed into a recombinant SARS-2 S protomer including S1 and S2 polypeptides, wherein the recombinant protein includes any of the appropriate modifications described herein, and optionally can be linked to a trimerization domain, such as a T4 Fibritin trimerization domain.

[0240] Exemplary nucleic acids can be prepared by molecular and cloning techniques. A wide variety of cloning methods, host cells, and in vitro amplification methodologies are well known to persons of skill, and can be used to make the nucleic acids and proteins of the invention.

[0241] The polynucleotides encoding a disclosed recombinant protomer can include a recombinant DNA which is incorporated into a vector (such as an expression vector) into an autonomously replicating plasmid or virus or into the genomic DNA of a prokaryote or eukaryote, or which exists as a separate molecule (such as a cDNA) independent of other sequences. The nucleotides can be ribonucleotides, deoxyribonucleotides, or modified forms of either nucleotide. The term includes single and double forms of DNA.

[0242] Polynucleotide sequences encoding a disclosed recombinant protomer can be operatively linked to expression control sequences. An expression control sequence operatively linked to a coding sequence is ligated such that expression of the coding sequence is achieved under conditions compatible with the expression control sequences. The expression control sequences include, but are not limited to, appropriate promoters, enhancers, transcription terminators, a start codon (i.e., ATG) in front of a protein-encoding gene, splicing signal for introns, maintenance of the correct reading frame of that gene to permit proper translation of mRNA, and stop codons.

[0243] DNA sequences encoding the disclosed recombinant protomer can be expressed in vitro by DNA transfer into a suitable host cell. The cell can be prokaryotic or eukaryotic. The term also includes any progeny of the subject host cell. All progeny need not be identical to the parental cell since there can be mutations that occur during replication. Methods of stable transfer, meaning that the foreign DNA is continuously maintained in the host, are known in the art.

[0244] Host systems for recombinant production can include microbial, yeast, insect and mammalian organisms. Methods of expressing DNA sequences having eukaryotic or viral sequences in prokaryotes are well known in the art. Non-limiting examples of suitable host cells include bacteria, archea, insect, fungi (for example, yeast), plant, and animal cells (for example, mammalian cells, such as human). Exemplary cells of use include Escherichia coli, Bacillus subtilis, Saccharomyces cerevisiae, Salmonella typhimurium, SF9 cells, C129 cells, 293 cells, Neurospora, and immortalized mammalian myeloid and lymphoid cell lines. Techniques for the propagation of mammalian cells in culture are well-known (see, e.g., Helgason and Miller (Eds.), 2012, Basic Cell Culture Protocols (Methods in Molecular Biology), 4.sup.th Ed., Humana Press). Examples of mammalian host cell lines are VERO and HeLa cells, CHO cells, and WI38, BHK, and COS cell lines, although cell lines can be used, such as cells designed to provide higher expression, desirable glycosylation patterns, or other features. In some embodiments, the host cells include HEK293 cells or derivatives thereof, such as GnTI^{-/-} cells, or HEK-293F cells.

[0245] In some embodiments, the disclosed recombinant coronavirus (e.g. SARS-2) S protein ectodomain protomer can be expressed in cells under conditions where the recombinant coronavirus (e.g. SARS-2) S protein ectodomain protomer can self-assemble into trimers which are secreted from the cells into the cell media. In such embodiments, each recombinant coronavirus (e.g. SARS-2) S protein ectodomain protomer contains a leader sequence (signal peptide) that causes the protein to enter the secretory system, where the signal peptide is cleaved and the protomers form a trimer, before being secreted in the cell media. The medium can be centrifuged and recombinant coronavirus (e.g. SARS-2) S protein ectodomain trimer can be purified from the supernatant.

[0246] A nucleic acid molecule encoding a protomer can be included in a viral vector, for example, for expression of the immunogen in a host cell, or for immunization of a subject as disclosed herein. In some embodiments, the viral vectors are administered to a subject as part of a prime-boost vaccination. In several embodiments, the viral vectors are included in a vaccine, such as a primer vaccine or a booster vaccine for use in a prime-boost vaccination.

[0247] In several examples, the viral vector can be replication-competent. For example, the viral vector can have a mutation in the viral genome that does not inhibit viral replication in host cells. The viral vector also can be conditionally replication-competent. In other examples, the viral vector is replication-deficient in host cells.

[0248] A number of viral vectors have been constructed, that can be used to express the disclosed antigens, including polyoma, i.e., SV40 (Madzak et al., 1992, J. Gen. Virol., 73:15331536), adenovirus (Berkner, 1992, Cur. Top. Microbiol. Immunol., 158:39-6; Berliner et al., 1988, Bio Techniques, 6:616-629; Gorziglia et al., 1992, J. Virol., 66:4407-4412; Quantin et al., 1992, Proc. Natl. Acad. Sci. USA, 89:2581-2584; Rosenfeld et al., 1992, Cell, 68:143-155; Wilkinson et al., 1992, Nucl. Acids Res., 20:2233-2239; Stratford-Perricaudet et al., 1990, Hum. Gene Ther., 1:241-256), vaccinia virus (Mackett et al., 1992, Biotechnology, 24:495-499), adeno-associated virus (Muzyczka, 1992, Curr. Top. Microbiol. Immunol., 158:91-123; On et al., 1990, Gene, 89:279-282), herpes viruses including HSV and EBV (Margolskee, 1992, Curr. Top. Microbiol. Immunol., 158:67-90; Johnson et al., 1992, J. Virol., 66:29522965; Fink et al., 1992, Hum. Gene Ther. 3:11-19; Breakfield et al., 1987, Mol. Neurobiol., 1:337-371; Fresse et al., 1990, Biochem. Pharmacol., 40:2189-2199), Sindbis viruses (H. Herweijer et al., 1995, Human Gene Therapy 6:1161-1167; U.S. Pat. Nos. 5,091,309 and 5,2217,879), alphaviruses (S. Schlesinger, 1993, Trends Biotechnol. 11:18-22; I. Frolov et al., 1996, Proc. Natl. Acad. Sci. USA 93:11371-11377) and retroviruses of avian (Brandyopadhyay et al., 1984, Mol. Cell Biol., 4:749-754; Petropouplos et al., 1992, J. Virol., 66:3391-3397), murine (Miller, 1992, Curr. Top. Microbiol. Immunol., 158:1-24; Miller et al., 1985, Mol. Cell Biol., 5:431-437; Sorge et al., 1984, Mol. Cell Biol., 4:1730-1737; Mann et al., 1985, J. Virol., 54:401-407), and human origin (Page et al., 1990, J. Virol., 64:5370-5276; Buchschalcher et al., 1992, J. Virol., 66:2731-2739). Baculovirus (Autographa californica multinuclear polyhedrosis virus; AcMNPV) vectors are also known in the art, and can be obtained from commercial sources (such as PharMingen, San Diego, Calif.; Protein Sciences Corp., Meriden, Conn.; Stratagene, La Jolla, Calif).

[0249] In several embodiments, the viral vector can include an adenoviral vector that expresses a protomer of the invention. Adenovirus from various origins, subtypes, or mixture of subtypes can be used as the source of the viral genome for the adenoviral vector. Non-human adenovirus (e.g., simian, chimpanzee, gorilla, avian, canine, ovine, or bovine adenoviruses) can be used to generate the adenoviral vector. For example, a simian adenovirus can be used as the source of the viral genome of the adenoviral vector. A simian adenovirus can be of serotype 1, 3, 7, 11, 16, 18, 19, 20, 27, 33, 38, 39, 48, 49, 50, or any other simian adenoviral serotype. A simian adenovirus can be referred to by using any suitable abbreviation known in the art, such as, for example, SV, SAdV, SAV or sAV. In some examples, a simian adenoviral vector is a simian adenoviral vector of serotype 3, 7, 11, 16, 18, 19, 20, 27, 33, 38, or 39. In one example, a chimpanzee serotype C Ad3 vector is used (see, e.g., Peruzzi et al., Vaccine, 27:1293-1300, 2009). Human adenovirus can be used as the source of the viral genome for the adenoviral vector. Human adenovirus can be of various subgroups or serotypes. For instance, an adenovirus can be of subgroup A (e.g., serotypes 12, 18, and 31), subgroup B (e.g., serotypes 3, 7, 11, 14, 16, 21, 34, 35, and 50), subgroup C (e.g., serotypes 1, 2, 5, and 6), subgroup D (e.g., serotypes 8, 9, 10, 13, 15, 17, 19, 20, 22, 23, 24, 25, 26, 27, 28, 29, 30, 32, 33, 36-39, and 42-48), subgroup E (e.g., serotype 4), subgroup F (e.g., serotypes 40 and 41), an unclassified serogroup (e.g., serotypes 49 and 51), or any other adenoviral serotype. The person of ordinary skill in the art is familiar with replication competent and deficient adenoviral vectors (including singly and multiply replication deficient adenoviral vectors). Examples of replication-deficient adenoviral vectors, including multiply replication-deficient adenoviral vectors, are disclosed in U.S. Pat. Nos. 5,837,511; 5,851,806; 5,994,106; 6,127,175; 6,482,616; and 7,195,896, and International Patent Application Nos. WO 94/28152, WO 95/02697, WO 95/16772, WO 95/34671, WO 96/22378, WO 97/12986, WO 97/21826, and WO 03/02231 1.

[0250] In some embodiments, a virus-like particle (VLP) is provided that comprises a recombinant protomer of the invention. In some embodiments, a virus-like particle (VLP) is provided that includes a recombinant trimer of the invention. Such VLPs can include a recombinant coronavirus (e.g. SARS-2) S protein ectodomain trimer that is membrane anchored by a C-terminal transmembrane domain, for example the recombinant coronavirus (e.g. SARS-2) S protein ectodomain protomers in the trimer each can be linked to a transmembrane domain and cytosolic tail from the corresponding coronavirus. VLPs lack the viral components that are required for virus replication and thus represent a highly attenuated, replication-incompetent form of a virus. However, the VLP can display a polypeptide (e.g., a recombinant coronavirus (e.g. SARS-2) S protein ectodomain trimer) that is analogous to that expressed on infectious virus particles and can eliciting an immune response to the corresponding coronavirus (e.g. SARS-2) when administered to a subject. Virus like particles and methods of their production are known and familiar to the person of ordinary skill in the art, and viral proteins from several viruses are known to form VLPs, including human papillomavirus, HIV (Kang et al., Biol. Chem. 380: 353-64 (1999)), Semliki-Forest virus (Notka et al., Biol. Chem. 380: 341-52 (1999)), human polyomavirus (Goldmann et al., J. Virol. 73: 4465-9 (1999)), rotavirus (Jiang et al., Vaccine 17: 1005-13 (1999)), parvovirus (Casal, Biotechnology and Applied Biochemistry, Vol 29, Part 2, pp 141-150 (1999)), canine parvovirus (Hurtado et al., J. Virol. 70: 5422-9 (1996)), hepatitis E virus (Li et al., J. Virol. 71: 7207-13 (1997)), and Newcastle disease virus. The formation of such VLPs can be detected by any suitable technique. Examples of suitable techniques known in the art for detection of VLPs in a medium include, e.g., electron microscopy techniques, dynamic light scattering (DLS), selective chromatographic separation (e.g., ion exchange, hydrophobic interaction, and/or size exclusion chromatographic separation of the VLPs) and density gradient centrifugation.

[0251] The immunogens of the invention can be combined with any suitable adjuvant.

[0252] A skilled artisan can readily determine the dose and number of immunizations needed to induce immune response. Various assays are known and used in the art to measure to level, breadth and durability of the induced immune response. In non-limiting embodiments the methods comprise two immunizations. The interval between immunizations can be readily determined by a skilled artisan. In non-limiting embodiments, the first and second immunization are about 2, 3, 4, 5, 6, 7, 8, 9, 10, 11, 12, 13, 14, 15, 16 weeks apart.

[0253] In certain embodiments the protein dose is in the range of 1-1000 micrograms. In certain embodiments the protein dose is in the range of 10-1000 micrograms. In certain embodiments the protein dose is in the range of 100-1000 micrograms. In certain embodiments the protein dose is in the range of 100-200 micrograms. In certain embodiments the protein dose is in the range of 100-300 micrograms. In certain embodiments the protein dose is in the range of 100-400 micrograms. In certain embodiments the protein dose is in the range of 100-500 micrograms. In certain embodiments the protein dose is in the range of 100-600 micrograms. In certain embodiments the protein dose is in the range of 50-100 micrograms. In certain embodiments the protein dose is in the range of 50-150 micrograms. In certain embodiments the protein dose is in the range of 50-200 micrograms. In certain embodiments the protein dose is in the range of 50-250 micrograms. In certain embodiments the protein dose is in the range of 50-300 micrograms. In certain embodiments the protein dose is in the range of 50-350 micrograms. In certain embodiments the protein dose is in the range of 50-400 micrograms. In certain embodiments the protein dose is in the range of 50-450 micrograms. In certain embodiments the protein dose is in the range of 50-500 micrograms. In certain embodiments the protein dose is in the range of 50-550 micrograms. In certain embodiments the protein dose is in the range of 50-600 micrograms. In certain embodiments the protein dose is in the range of 75-100 micrograms. In certain embodiments the protein dose is in the range of 75-125 micrograms. In certain embodiments the protein dose is in the range of 75-150 micrograms. In certain embodiments the protein dose is in the range of 75-175 micrograms. In certain embodiments the protein dose is in the range of 75-200 micrograms. In certain embodiments the protein dose is in the range of 75-225 micrograms. In certain embodiments the protein dose is in the range of 75-250 micrograms. In certain embodiments the protein dose is 10, 25, 50, 75, 100, 125, 150, 175, 200, 225, 250, 275, 300, 325, 350, 375, 400, 425, 450, 475, 500, 525, 550, 575, 600, 625, 650, 700, 750, 800, 850, 900, 950 or 1000 micrograms.

[0254] In certain embodiments adjuvant dose is in the range of 1-200 micrograms. In certain embodiments adjuvant dose is in the range of 1-100 micrograms. In certain embodiments the adjuvant dose is 1-50 micrograms. In certain embodiments the adjuvant dose is 1-25 micrograms. In certain embodiments the adjuvant dose is 1-50 micrograms. In certain embodiments the adjuvant dose is 1-20 micrograms. In certain embodiments the adjuvant dose is 1-50 micrograms. In certain embodiments the adjuvant dose is 1-15 micrograms. In certain embodiments the adjuvant dose is 1-50 micrograms. In certain embodiments the adjuvant dose is 1-10 micrograms. In certain embodiments the adjuvant dose is 1-5 micrograms. In certain embodiments the adjuvant dose is 5-10 micrograms. In certain embodiments the adjuvant dose is 5-15 micrograms. In certain embodiments the adjuvant dose is 1, 2, 3, 4, 5, 6, 7, 8, 9, 10, 11, 12, 13, 14, 15, 16, 17, 18, 19, 20, 21, 22, 23, 24, 25, 26, 27, 28, 29, 30, 31, 32, 33, 34, 35, 36, 37, 38, 39, 40, 41, 42, 43, 44, 45, 46, or 45-50 micrograms. Non-limiting examples of evaluating the immunogenicity and effectiveness of the immunogens of the invention are shown in US Patent Pub 20200061185 which disclosure is incorporated by reference in its entirety.

TABLE 1
Cleaved and uncleaved unstabilized soluble Spike proteins that lack the
foldon trimerization domain and lack 2 prolines to stabilize
the trimer. FIG. 25A shows non-limiting embodiments of nucleic
acids and FIG. 25I shows non-limiting embodiments
of amino acid sequences.

| | |
|---|---|
| HV1301945v2 | SARS-2 Cleaved soluble Spike_bPrlss_3C_6XHis |
| HV1301946 | SARS-2 Cleaved soluble Spike_3C_6XHis |
| HV1301947v2 | SARS-2 C-soluble Spike_bPrlss_3C_6XHis |
| HV1301948 | SARS-2 C-soluble Spike_3C_6XHis |

TABLE 2
Cleaved and uncleaved unstabilized cell-surface Spike proteins that
lack the foldon trimerization domain and lack 2 prolines to stabilize
the trimer. FIG. 25B shows non-limiting embodiments of nucleic
acids and FIG. 25J shows non-limiting embodiments
of amino acid sequences.

| | |
|---|---|
| HV1301949 | SARS-2 Cleaved membrane Spike |
| HV1301950v2 | SARS-2 Cleaved membrane Spike_bPrlss |
| HV1301951 | SARS-2 C-membrane Spike |
| HV1301952v2 | SARS-2 C-membrane Spike_bPrlss |

TABLE 3
Cleaved and uncleaved soluble Spike proteins stabilized by the foldon
trimerization domain but lacks 2 prolines to stabilize
the trimer. FIG. 25C shows non-limiting embodiments of nucleic acids
and FIG. 25K shows non-limiting embodiments of
amino acid sequences.

| | |
|---|---|
| HV1301953v2 | SARS-2 Cleaved soluble Spike_bPrlss_foldon_3C_6XHis |
| HV1301954 | SARS-2 Cleaved soluble Spike_foldon_3C_6XHis |
| HV1301955v2 | SARS-2 C-soluble Spike_bPrlss_foldon_3C_6XHis |
| HV1301956 | SARS-2 C-soluble Spike_foldon_3C_6XHis |

TABLE 4
Cleaved and uncleaved soluble Spike proteins stabilized by the
addition of 2 prolines. FIG. 25D shows non-limiting
embodiments of nucleic acids and FIG. 25L
shows non-limiting embodiments of amino acid sequences.

| | |
|---|---|
| HV1301964 | SARS-2 Cleaved soluble |
| | Spike_bPrlss_K986P + V987P_3C_6XHis |
| HV1301965 | SARS-2 Cleaved soluble Spike_K986P + V987P_3C_6XHis |
| HV1301966 | SARS-2 C-soluble |
| | Spike_bPrlss_K986P + V987P_3C_6XHis |
| HV1301967 | SARS-2 C-soluble Spike_K986P + V987P_3C_6XHis |

TABLE 5
Cleaved and uncleaved stabilized cell-surface Spike proteins that lack the
foldon trimerization domain and are stabilized by the
addition of 2 prolines. FIG. 25E shows non-limiting embodiments
of nucleic acids and FIG. 25M shows non-limiting
embodiments of amino acid sequences.

| | |
|---|---|
| HV1301968 | SARS-2 Cleaved membrane Spike_K986P + V987P |
| HV1301969 | SARS-2 Cleaved membrane Spike_bPrlss_K986P + V987P |
| HV1301970 | SARS-2 C-membrane Spike_K986P + V987P |
| HV1301971 | SARS-2 C-membrane Spike_bPrlss_K986P + V987P |

TABLE 6
Soluble Spike proteins stabilized by the foldon trimerization
domain and the addition of 2 prolines. FIG. 25F shows
non-limiting embodiments of nucleic acids and
FIG. 25N shows non-limiting embodiments of amino acid sequences.

| HV130197 | SARS-2 Cleaved soluble |
|---|---|
| 2 | Spike_bPrlss_foldon_K986P + V987P_3C_6XHis |
| HV130197 | SARS-2 Cleaved soluble |
| 3 | Spike_foldon_K986P + V987P_3C_6XHis |
| HV130197 | SARS-2 C-soluble |
| 4 | Spike_bPrlss_foldon_X986P + V987P_3C_6XHis |
| HV130197 | SARS-2 C-soluble Spike_foldon_K986P + V987P_3C 6XHis |
| 5 | |

TABLE 7
Soluble Spike proteins stabilized by the foldon trimerization domain, the
addition of 2 prolines, and additional cysteine bonds. Non-limiting
embodiments of sequences are shown in FIG. 8 and FIG. 25O.

| | |
|---|---|
| HV1301963_HV1301976 | nCoV-1 nCoV-2P_S383C_D985C |
| HV1301977 | nCoV-1 nCoV-2P_S383C_A570C_ |
| | G669C_T866C_L966C_D985C |
| HV1301978 | nCoV-1 nCoV-2P_K41C_A520C |
| HV1301979 | nCoV-1 nCoV-2P_F43C_S383C_ |
| | G566C_G669C_T866C_D985C |
| HV1301980 | nCoV-1 nCoV-2P_K41C_A520C_ |
| | A570C_G669C_T866C_L966C |

TABLE 8
Cell-surface Spike proteins stabilized by the addition of 2 prolines and
additional cysteine bonds. FIG. 25G and 25P shows
non-limiting embodiments of amino acid sequences.

| | |
|---|---|
| HV1301962 | SARS CoV-2 membrane S |
| | protein_D985C + S383C_K986P + V987P |

TABLE 9A
Multimeric nanoparticle immunogens. FIG. 25H shows non-limiting
embodiments of nucleic acids and FIG. 25Q shows
non-limiting embodiments of amino acid sequences.

| | |
|---|---|
| HV1301985 | RBDferritin_v1_3CHis |
| HV1301986 | RBDferritin_v2_3CHis |
| HV1301987 | SARS-2S-foldonferritin_v1_3CHis |
| HV1301988 | SARS-2S-foldonferritin_v2_3CHis |
| HV1301989 | SARS-2_RIS_ferritin_v1_3CHis |
| HV1301990 | SARS-2_RIS_ferritin_v2_3CHis |
| HV1301991 | SARS-2_RISx3_ferritin_v1_3CHis |
| HV1301992 | SARS-2_RISx3_ferritin_v2_3CHis |

TABLE 9B
Summary of sequences from FIG.s 10A-M

| | A non-limiting |
|---|---|
| | embodiment of a |
| | sequence is shown in |
| Name | Figure. |
| rS2d plus S2 stabilization: | A non-limiting |
| S730L + T778V | embodiment of a |
| T734I + Q1011L | sequence is shown in |
| T734I + Q1011L + Y1007F | FIG. 10A-10H |
| T8811 + Q901L + R905Y | |
| N907L + Q913I + E1092I | |
| N907L + Q913I + E1092F | |
| S730L + T778V + N907L + Q913I + E1092I | |
| T734I + Q1011L + N907L + Q913I + E1092I | |
| rS2d plus SD2 to S2: | A non-limiting |
| G669C + T866C | embodiment of a |
| T866C + G669C | sequence is shown in |
| | FIG. 10I |
| rS2d plus S2 stabilization and SD2 to S2: | A non-limiting |
| S730L + T778V + G669C + T866C | embodiment of a |
| T734I + Q1011L + T866C + G669C | sequence is shown in |
| S730L + T778V + N907L + Q913I + | FIG. 10J-M |
| E1092I + G669C + T866C | |
| T734I + Q1011L + N907L + Q913I + | |
| E1092I + T866C + G669C | |

TABLE 9C
Summary of sequences of cluster mutations from FIG. 8.

| | A non-limiting |
|---|---|
| | embodiment of a |
| | sequence is shown in |
| Group | Figure. |
| Cluster 1 | FIG. 8B- |
| Cluster 2 | FIG. 8C |
| Cluster 3 | FIG. 8D |
| Cluster 4 | FIG. 8E |
| Cluster 5 | FIG. 8F |
| Cluster 6 | FIG. 8G |
| Cluster 7 | FIG. 8H |
| Cluster 8 | FIG. 8I |
| Cluster 9 | FIG. 8J |
| Cluster 10 | FIG. 8K |
| Cluster 11 | FIG. 8L |

### EXAMPLES

### Example 1A

[0255] Any of the SARS-2 designs, including without limitation as listed in FIG. 7, 8, 9, 10, 25 will be expressed, characterized and tested for antigenicity and immunogenicity. Immuonogenicity studies include animal challenge studies. A non-limiting embodiment of an animal study is outlined in Example 2.

### Example 1B

[0256] SARS-2 designs expressed as nucleic acids or proteins will be expressed, characterized and tested for antigenicity and immunogenicity. Immuonogenicity studies include animal challenge studies. A non-limiting embodiment of an animal study is outlined in Example 2.

### Example 2

[0257] Animal study NHP #174: non-human primates (NHPs) are immunized with SARS-2 immunogen designs of the invention. Immune response was evaluated and animals were challenge with SARS-2 stock. The animal study design and immunogen are summarized in FIG. 11A-B.

[0258] Data from the animal study are summarized in FIGS. 11-24.

[0259] These results show that immunization with the disulfide-stabilized spike ectodomain mRNA-LNP in rhesus macaques elicited IgG antibodies against the receptor binding, N-terminal, and S2 domains of SARS-CoV-2 spike protein. The serum from disulfide-stabilized spike ectodomain mRNA-LNP-immunized macaques blocked ACE2 binding to the receptor domain of SARS-CoV-2 spike protein. Consistent with blocking the ACE2 receptor binding to SARS-CoV-2 spike, the serum neutralized both pseudotyped virus and replication-competent SARS-CoV-2. The vaccine-induced immunity suppressed SARS-CoV-2 replication in the lower respiratory tract and to a lesser extent in the upper respiratory tract. Additionally, inflammatory cytokine production in the lung was decreased in disulfide-stabilized spike ectodomain mRNA-LNP-immunized compared to macaques that received mRNA-LNP encoding an irrelevant protein. Thus, immunization with disulfide-stabilized spike ectodomain mRNA-LNP-immunized generated immunity that protected against SARS-CoV-2 infection.

[0260] Further analyses of the animal study include immunogenicity, levels of antibodies, types of antibodies—neutralizing or not, serum neutralization of pseudo-virus, diversity of epitopes targeted by the induced antibodies, protection after challenge with virus, and any other suitable assay.

### Example 3A

[0261] Controlling the SARS-CoV-2 Spike Glycoprotein Conformation

[0262] Abstract

[0263] The coronavirus (CoV) viral host cell fusion spike (S) protein is the primary immunogenic target for virus neutralization and the current focus of many vaccine design efforts. The highly flexible S-protein, with its mobile domains, presents a moving target to the immune system. Here, to better understand S-protein mobility, we implemented a structure-based vector analysis of available β-CoV S-protein structures. We found that despite overall similarity in domain organization, different β-CoV strains display distinct S-protein configurations. Based on this analysis, we developed two soluble ectodomain constructs in which the highly immunogenic and mobile receptor binding domain (RBD) is locked in the all-RBDs ‘down’ position or is induced to display a previously unobserved in SARS-CoV-2 2-RBDs ‘up’ configuration. These results demonstrate that the conformation of the S-protein can be controlled via rational design and provide a framework for the development of engineered coronavirus spike proteins for vaccine applications.

### INTRODUCTION

[0264] The ongoing global pandemic of the new SARS-CoV-2 (SARS-2) coronavirus presents an urgent need for the development of effective preventative and treatment therapies. The viral S-protein is a prime target for such therapies owing to its critical role in the virus lifecycle. The S-protein is divided into two regions: an N-terminal S1 domain that caps the C-terminal S2 fusion domain. Binding to host receptor via the Receptor Binding Domain (RBD) in S1 is followed by proteolytic cleavage of the spike by host proteases¹. Large conformational changes in the S-protein result in S1 shedding and exposure of the fusion machinery in S2. Class I fusion proteins, such as the CoV-2 S-protein, undergo large conformational changes during the fusion process and must, by necessity, be highly flexible and dynamic. Indeed, cryo-electron microscopy (cryo-EM) structures of SARS-2 spike reveal considerable flexibility and dynamics in the S1 domain^{1,2}, especially around the RBD that exhibits two discrete conformational states—a ‘down’ state that is shielded from receptor binding, and an ‘up’ state that is receptor-accessible.

[0265] The wealth of structural information for β-CoV spike proteins, including the recently determined cryo-EM structures of the SARS-2 spike¹⁻¹¹, has provided a rich source of detailed geometric information from which to begin precise examination of the macromolecular transitions underlying triggering of this fusion machine. The transmembrane CoV S-protein spike trimer is composed of interwoven protomers that include an N-terminal receptor binding S1 domain and a C-terminal S2 domain that contains the fusion elements (FIGS. 26A and B).2 The S1 domain is subdivided into the N-terminal domain (NTD) followed by the receptor binding domain (RBD) and two structurally conserved subdomains (SD1 and SD2). Together these domains cap the S2 domain, protecting the conserved fusion machinery. Several structures of soluble ectodomain constructs that retain the complete S1 domain and the surface exposed S2 domain have been determined. These include SARS-2^{1,3}, SARS⁴⁻⁸, MERS^{4,9}, and other human^{2,10} and murine¹¹ β-CoV spike proteins. These structures revealed remarkable conformational heterogeneity in the S-protein spikes, especially in the RBD region. Within a single protomer, the RBD can adopt a closed ‘down’ state (FIG. 26A), in which the RBD covers the apical region of the S2 protein near the C-terminus of the first heptad repeat (HR1), or an open ‘up’ state in which the RBD is dissociated from the apical central axis of S2 and the NTD. Further, cryo-EM structures indicates a large degree of domain flexibility in both the ‘down’ and ‘up’ states in the NTD and RBD. While these structures have provided essential information to identify the relative arrangement of these domains, the degree to which conformational heterogeneity can be altered via mutation during the natural evolution of the virus and in a vaccine immunogen design context remains to be determined.

[0266] In this study we have quantified the variability in the S1 and S2 geometric arrangements to reveal important regions of flexibility to consider and to target for structure-based immunogen design. Based on these analyses, we have designed mutations that alter the conformational distribution of the domains in the S-protein. We visualized the effect of our designs using a structural determination pipeline relying first on single particle analysis by negative stain electron microscopy (NSEM) for rapid and low-cost assessment of the spike ectodomains at low resolution, followed by cryo-EM for high-resolution information on the changes introduced by these mutations. Our results reveal a heterogeneous conformational landscape of the SARS-CoV-2 spike that is highly susceptible to modification by the introduction of mutations at sites of contact between the S1 and S2 domains. We also present data on modified SARS-2 ectodomain constructs stabilized in conformations that have not yet been seen in the current available structures, with great interest and direct application in vaccine design.

[0267] Results

[0268] Detailed Structural Schema Defining the Geometry and Internal Rearrangements of Movable Domains of the SARS-2 Spike.

[0269] To characterize the unique arrangement of distinct domains in the CoV spike, we first aimed to develop a precise quantitative definition of their relative positions. Examination of available SARS and MERS S-protein structures revealed: 1) the NTD and RBD subdomains and internal S2 domain move as rigid bodies, and 2) these domains display a remarkable array of relative shifts between the domains in the S1 region and the S2 region's β-sheet motif and connector domain (CD) (FIG. 26B-F). In order to quantify these movements, we have analyzed the relevant regions of motion and their structural disposition in all available β-CoV ectodomain spike structures including 15 SARS^{4,5,7,8}, 10 MERS^{4,12}, a HKU1^{2,10}, an OC43^{2,10}, a murine β-CoV, and three SARS-2^{13,14} structures (FIGS. 26E-F and 27). Each protomer in those structures displaying asymmetric ‘up’/‘down’ RBD states was examined independently yielding a dataset of 76 structural states. The NTD was split into a primary N-terminal section and a secondary C-terminal section based upon visual inspection of this region in the various β-CoV structures (FIGS. 26B-C and 27). We next analyzed S-protein geometry using a vector-based approach. Specifically, vectors connecting each region's C_{α} centroids were generated and used to define the relative dispositions of the domains (FIGS. 26C and 27). The vector magnitudes and select angles and dihedrals were used to identify the breadth of differences in domain positioning and compare between strains. The results indicated that β-CoV spike proteins in various strains differ markedly from one another and that considerable variability in the domain arrangements within strains exists, especially in the SARS ectodomains (FIGS. 26E-F and 27A-H). For example, both θ₁ and ϕ₁ (FIG. 27A-B), describing the angle between the SD2 to SD1 and SD1 to RBD vectors as well as the SD1 to RBD dihedral, respectively, effectively report on the ‘up’ and ‘down’ configurations while indicating substantial differences between SARS and MERS in both the ‘up’ and ‘down’ states. The angular disposition of the NTD elements further indicated differences in SARS and MERS with a marked shift from the examined β-CoV spikes in the murine structure (FIG. 26E). Additional S1 differences are observed between vectors involving SD2. The disposition of the S2 domain relative to S1 defined by the dihedral about the vector connecting SD2 to the S2 CD differs markedly between MERS/SARS-2 and SARS as well with the angle between the vectors connecting the NTD′ to SD2 and SD2 to the CD demonstrating a shift in SARS-2. Finally, the disposition of the CD to the inner portion of S2 measured as an angle between a vector connected to an interior S2 β-sheet motif and the vector connecting the CD to SD2 indicates SARS differs from both MERS and SARS-2. Interestingly, the MERS disposition appears to respond to RBD triggering, displaying a bimodal distribution. These results demonstrate that, while the individual domain architectures and overall arrangements are conserved (FIG. 26D), important differences between these domains exists between strains, indicating that subtle differences in inter-domain contacts can play a major role in determining these distributions and thereby alter surface antigenicity and the propensity of the domains to access ‘up’ and ‘down’ RBD states.

[0270] Identification of Sites for Differential Stabilization of the SARS-2 Ectodomain Spike RBD Orientation.

[0271] Based on the observed variability in the geometric analysis of β-CoV spikes, we asked whether the propensity for the RBD to display the ‘down’ and ‘up’ states can be modified via mutations without altering exposed antigenic surfaces. To this end, we identified protomer to protomer interactive sites amenable to modification and down selected mutations at these sites using the Schrödinger Biologics suite. In an effort to eliminate exposure of the receptor binding site of the RBD, we examined the potential for disulfide linkages between the RBD and its contact with S2 near the C-terminus of HR1 to prevent RBD exposure. We identified a double cysteine mutant, S383C and D985C (RBD to S2 double mutant; rS2d; FIG. 33), as a candidate for achieving this goal. The transition from the ‘down’ state to the ‘up’ state involves shifts in the RBD to NTD contacts. Therefore, in an effort to prevent these shifts, we identified a site in an RBD groove adjacent to the NTD for which we prepared a triple mutant, D398L, S514L, and E516L (RBD to NTD triple mutant; rNt, FIG. 33). As SD1 acts as a hinge point for the RBD ‘up’/‘down’ transitions (FIGS. 26A-C, 27I-J), without wishing to be bound by theory, enhanced hydrophobicity at the SD1 to S2 interface can shift the position of SD1, thus influencing the hinge and potentially the propensity for RBD triggering. A double mutant, N866I and A570L (Subdomain 1 to S2 double mutant; u1S2d, FIG. 33), as well as quadruple mutant, A570L, T572I, F855Y, and N8561 (Subdomain 1 to S2 quadruple mutant; u1S2q), were identified for this purpose. Finally, we asked whether linking SD2 to S2 can alter the conformational distribution of the RBDs. The double cysteine mutant, G669C and T866C (Subdomain 1 to S2 double mutant; u2S2d, FIG. 33), was identified for this purpose. These mutants were prepared in the context of a previously published SARS-2 ectodomain construct³.

[0272] NSEM Analysis of the SARS-2 Spike Ectodomain Proteins.

[0273] To assess the quality of the purified spike proteins and to obtain low resolution visualization of the structures, we performed NSEM analysis. The micrographs showed a reasonably uniform distribution of particles consistent with the size and shape of the SARS-2 spike ectodomain (FIG. 28). 2D class averages showed spike populations with well resolved domain features. The data were subjected to 3D classification followed by homogeneous refinement. The unmutated construct was resolved into two classes of roughly equal proportions. The two classes differed in the position of their RBD domains. One classy displayed all three RBDs in their ‘down’ positions, whereas, the other class, —displayed one RBD in the ‘up’ position. This was consistent with published cryo-EM results¹⁵ that described a 1:1 ratio between the ‘down’ and ‘1-up’ states of the SARS-2 spike ectodomain. The mutant spikes were analyzed using a similar workflow as the unmutated spike. All of the mutants displayed well-formed spikes in the micrographs, as well as in the 2D class averages. Following 3D classification, for the rS2d construct, we observed only the ‘down’ conformation; the 1-RBD up state that was seen for the unmutated spike was not found in this dataset. The u1S2q mutant presented another striking finding, where we observed a new conformational state with 2 RBDs in the ‘up’ position. The 2-RBD ‘up’ state has been reported before for the MERS CoV spike ectodomain¹² but has not been observed thus far for the SARS or the SARS-2 spikes. Based on the NSEM analysis we selected the rS2d and u1S2q constructs for high resolution analysis by cryo-EM.

[0274] Cryo-EM Analysis of the SARS-2 Spike Ectodomain Proteins.

[0275] To visualize the mutations and their effect on the structure of the spike, we collected cryo-EM datasets for the rS2d and u1S2q constructs (FIG. 29-32, Table 10, FIGS. 34 and 35). Consistent with what was observed in the NSEM analysis, after multiple rounds of 2D and 3D-classification to remove junk particles and broken and/or misfolded spikes, we found a population of ‘down’ state spike in the rS2d dataset through ab initio classification in cryoSparc. We then implemented additional exhaustive ab initio classifications, as well as heterogeneous classifications using low-pass filtered maps of known open conformations of CoV spikes to search for open state spikes in the dataset. We were unable to find any such states, confirming that the SARS-2 spike was locked in its ‘down’ conformation in the rS2d mutant. The rS2d disulfide linked density at the mutation site confirmed disulfide formation in the double mutant (rS2d) (FIG. 30). Comparison of the domain arrangements of this construct with that of the unmutated ‘down’ closed state structure indicated the protein structure was otherwise unperturbed (Supplemental FIG. 36A).

[0276] In contrast to the rS2d design, the u1S2q design displayed widespread rearrangement of the S1 domains (FIG. 33B). In the ‘down’ state structure, density in the mutated S2 position remained in the configuration observed in the unmutated construct with the N8551 and F856Y residue loop in close proximity the S2 residue L966 and S1 residue P589. This indicated that these mutations had little impact on the observed shifts. However, the S2 interactive SD1 displayed a rigid body movement relative to both the rS2d and unmutated constructs with θ₁ and ϕ₃ displacements of 3.4° and 1.8°, respectively (FIGS. 30A and B). This resulted in displacement of the A570L+T572I containing loop from the unmutated position which resides near the S2 L966 residue (FIG. 30B and FIG. 33C). The S2 contact disruption is accompanied by an angular shift of the NTD away from the primary trimer axis owing to subdomain-1 to NTD′ contacts, yielding θ₃ and ϕ₃ shifts of 5.4° and 7.7°, respectively (FIG. 31C). The subdomain rearrangement impacts the positioning of the RBD with only a minor shift in the ϕ1 dihedral of 0.1° indicating the RBD moved with SD1 indicated in the θ1/ϕ3 shifts. The newly acquired arrangement in both the RBD and NTD was further accompanied by an apparent increase in their flexibility indicating conformational heterogeneity. These down state shifts were observed in both the single RBD ‘up’ structure and the two RBD ‘up’ structures (FIG. 31). Interestingly, the extent to which the SD1 shift differed from that observed in the unmutated construct was context dependent in the 1 RBD up state. While the down state RBD in contact with the up state RBD displayed the large shift in position observed in the all down state, the down state RBD with its terminal position free displayed an intermediate SD1 configuration. The up state RBD in the u1S2q construct resided largely in the position occupied in the unmutated construct. This indicated the effect of the mutations was primarily isolated to the down state and indicated these mutations act to destabilize the down state rather than to stabilize the up state. These features were largely recapitulated in the u1S2q 2 RBD up state conformation with subdomain 1 retaining the shift in the down state RBD (FIG. 32). The structural details presented here indicate that, while locking the ‘down’ state RBD into its unmutated position had little impact on the overall configuration of S1, altering the disposition of SD1 had wide ranging impacts, consistent with the observed strain-to-strain differences in the geometric analysis described in FIGS. 26 and 27.

TABLE 10
Cryo-EM Data Collection and Refinement Statistics

| SARS-2 spike | | u1S2q construct | | |
|---|---|---|---|---|
| construct | r2S2d | | 1-RBD | 2-RBD |
| Conformation | ‘down’ | ‘down’ | ‘up’ | ‘up’ |
| Data Collection | FEI Titan | | FEI Titan | |
| Microscope | Krios | | Krios | |
| Voltage (kV) | 300 | | 300 | |
| Electron dose (e⁻/Å²) | 65.18 | | 66.82 | |
| Detector | Gatan K3 | | Gatan K3 | |
| Pixel Size (Å) | 1.06 | | 1.058 | |
| Defocus Range (μm) | 0.63-2.368 | | 0.55-2.94 | |
| Magnification | 81000 | | 81000 | |
| Micrographs | 6021 | | 7232 | |
| Collected | | | | |
| Reconstruction | | | | |
| Software | cryoSPARC | | cryoSPARC | |
| Particles | 367,259 | 192,430 | 255,013 | 133,957 |
| Symmetry | C3 | C3 | C1 | C1 |
| Box size (pix) | 300 | 300 | 300 | 300 |
| Resolution (Å)^{$} | 2.7 | 3.2 | 3.3 | 3.6 |
| Corrected | | | | |
| Refinement (Phenix) | | | | |
| ^{#} | | | | |
| Protein residues | 2916 | 2913 | 2875 | 2862 |
| Resolution (FSC_{0.5}) | 2.9 | 3.3 | 3.7 | 3.8 |
| EMRinger Score | 3.11 | 3.02 | 1.33 | 2.69 |
| R.m.s. deviations | | | | |
| Bond lengths (Å) | 0.009 | 0.005 | 0.013 | 0.011 |
| Bond angles (º) | 1.2 | 0.859 | 1.276 | 1.272 |
| Validation | | | | |
| Molprobity score | 1.58 | 1.52 | 0.75 | 1.84 |
| Clash score | 3.93 | 4.57 | 0.41 | 6.6 |
| Favored rotamers (%) | 99.41 | 98.75 | 99.34 | 97.46 |
| Ramachandran | | | | |
| Favored regions (%) | 94.23 | 95.88 | 97.5 | 92.37 |
| Disallowed regions | 0 | 0.04 | 0.07 | 0.11 |
| (%) | | | | |

^{$}Resolutions are reported according to the FSC 0.143 gold-standard criterion

### DISCUSSION

[0277] Conformational plasticity is a hallmark of enveloped-virus fusion-protein structure, owing to the necessity of protecting the conserved viral fusion elements from host immune responses while retaining a sufficiently steep free-energy gradient to enable host cell fusion¹⁶. Exposed elements can be well conditioned to be permissive and responsive to mutations through genetic drift and host immune adaptation. Conformational plasticity, however, presents an important difficulty in the context of vaccine and drug design. Indeed, lessons learned in the continued effort to produce a broadly protective HIV-1 vaccine have demonstrated the importance of a detailed understanding and control of fusion protein dynamics¹⁷⁻²⁸. The new SARS-CoV-2 is no exception in this regard and indeed the conformational plasticity of the SARS-2 S-protein appeared greater than that of the HIV-1 Env. We aimed to develop a quantitative understanding of β-CoV structural states between strains and within each RBD down and up state configuration. The wide breadth of domain arrangements along with the relatively small contact area between the S1 and S2 subunits observed here indicated that, despite a relatively low mutation rate, dramatic changes in S-protein structure can occur from few mutations. Indeed, recent evidence for a mutation in the SD2 to S2 contact region indicates a fitness gain for acquisition of such interfacial residues²⁹. Based upon our results, this mutant, D614G, can indeed alter the conformational landscape of the SARS-CoV-2 S-protein.

[0278] From the perspective of immunogen development, the constructs developed here present an opportunity to examine the ability of differentially stabilized S-protein particles to induce two different, yet important antibody responses. First, without wishing to be bound by theory, the disulfide linked ‘down’ state locked double mutant (rS2d) can eliminate receptor binding site targeting antibodies which make up the majority of observed responses^{30,31}. Indeed, a study of MERS responses indicate non-RBD responses (such as NTD and S2 epitopes) will play an important role in vaccine induced protection³². From a theoretical perspective, the wide control over the RBD ‘up’/‘down’ distribution available to the virus indicates that, by analogy to known difficult to neutralize HIV-1 strains, conformational blocking of antibody responses is not be unusual. Although this can result in a fitness cost to the virus, it does not necessarily make the virion non-infectious. Using the double mutant rS2d as an immunogen provides a platform from which to induce such non-RBD responses that can be needed to protect against such an evasion. The second area of interest comprises cryptic pocket targeting antibodies which have proven effective in the neutralization of SARS. These antibodies target an epitope presented only in the ‘up’ state RBDs and appear to require a two RBD ‘up’ configuration³³. The current stabilized ectodomain construct in wide use in SARS-CoV-2 clinical trials was demonstrated previously, and recapitulated here by NSEM, to display only the ‘down’ and one RBD ‘up’ states. However, the u1S2q, SD1/S2 targeting design developed here display a prominent two RBD ‘up’ state distribution compatible with these cryptic-epitope targeting MAbs. This indicates it can induce such antibodies. While complicating factors, such as vaccine enhancement, can favor the use of truncated, single domain constructs which can display fewer weakly or non-neutralizing epitopes, these, along with the designs presented here will allow for a detailed characterization of not only vaccine immunogenicity but also antigenicity, paving the way for next generation vaccines for the new SARS-CoV-2 and the development of a broadly neutralizing β-CoV vaccine. Thus, while the previous generation of stabilizing mutations ensure well folded trimer, the rational design approach developed here provides a means by which precisely controlling the RBD orientation distribution, thus allowing exploratory efforts to understand the role of conformational dynamics from the perspective of vaccine and drug development.

[0279] Methods

[0280] Vector Based Analysis

[0281] Vector analysis was performed using available cryo-EM structures for SARS-2^{13,14}, SARS^{4,5,7,8}, MERS^{4,12}, and other human^{2,10} and murine¹¹ β-CoV spike proteins. Domains for the vector analysis were selected based upon visual inspection of alignments between SARS, MERS, and SARS-CoV-2 structures. Specifically, C_{α} centroids for the S1 NTD, RBD, SD1, SD2 (SARS-CoV-2 residues, 27-43 and 54-271, 330-443 and 503-528, 323-329 and 529-590, 294-322 and 591-696, respectively; equivalent SARS/MERS/Murine/HKU1/OC43 residues selected based upon structural alignment with SARS-CoV-2) as well as a β-sheet motif in the NTD (residues 116-129 and 169-172) and a helix motif in the RBD (residues 403-410) were determined. The NTD was split into two regions with the SD1 contacting, SD2 adjacent portion referred to here as the NTD′ (residues 44-53 and 272-293). C_{α} centroids in the S2 domain were obtained for a β-sheet motif (residues 717-727 and 1047-1071) and the CD domain (711-716 and 1072-1122). Vector magnitudes, angles, and dihedrals between these centroids were determined and used in the subsequent analysis. Vector analysis was performed using the VMD³⁴ Tcl interface. Principal component analysis performed in R with the vector data centered and scaled³⁵.

[0282] Rational, Structure-Based Design

[0283] Structures for SARS (PDB ID 5X58⁴), MERS (PDB ID 6Q04³⁶), and SARS-CoV-2 (PDB ID 6VXX¹⁵) were prepared in Maestro³⁷ using the protein preparation wizard³⁸ followed by in silico mutagenesis using Schrödinger's cysteine mutation³⁹ and residue scanning⁴⁰ tools. Residue scanning was first performed for individual selected sites allowing mutations to Leu, Ile, Trp, Tyr, and Val followed by scanning of combinations for those which yielded a negative overall score. Scores and visual inspection were used in the selection of the prepared constructs.

[0284] Protein Expression and Purification

[0285] The SARS-CoV-2 ectodomain constructs were produced and purified as described previously. Briefly, a gene encoding residues 1-1208 of the SARS-CoV-2 S (GenBank: MN908947) with proline substitutions at residues 986 and 987, a “GSAS” (SEQ ID NO: 3) substitution at the furin cleavage site (residues 682-685), a C-terminal T4 fibritin trimerization motif, an HRV3C protease cleavage site, a TwinStrepTag and an 8XHisTag (SEQ ID NO: 4) was synthesized and cloned into the mammalian expression vector pαH. All mutants were introduced in this background. expression plasmids encoding the ectodomain sequence were used to transiently transfect FreeStyle293F cells using Turbo293 (SpeedBiosystems). Protein was purified on the sixth day post transfection from the filtered supernatant using StrepTactin resin (IBA).

[0286] Cryo-EM Sample Preparation and Data Collection

[0287] Purified SARS-CoV-2 spike preparations were diluted to a concentration of ˜1 mg/mL in 2 mM Tris pH 8.0, 200 mM NaCl and 0.02% NaN3. 2.5 uL of protein was deposited on a CF-1.2/1.3 grid that had been glow discharged for 30 seconds in a PELCO easiGlow™ Glow Discharge Cleaning System. After a 30 s incubation in >95% humidity, excess protein was blotted away for 2.5 seconds before being plunge frozen into liquid ethane using a Leica EM GP2 plunge freezer (Leica Microsystems). Frozen grids were imaged in a Titan Krios (Thermo Fisher) equipped with a K3 detector (Gatan). Data were acquired using the Leginon system⁴¹. The dose was fractionated over 50 raw frames and collected at 50 ms framerate. This dataset was energy-filtered with a slit width of 30 eV. Individual frames were aligned and dose-weighted. CTF estimation, particle picking, 2D classifications, ab initio model generation, heterogeneous refinements, and homogeneous 3D refinements were carried out in cryoSPARC⁴².

[0288] Cryo-EM Structure Fitting

[0289] Structures of the all ‘down’ state (PDB ID 6VXX) and single RBD ‘up’ state (PDB ID 6VYB) from the previously published SARS-CoV-2 ectodomain were used to fit the cryo-EM maps in Chimera⁴³. The 2 RBD ‘up’ state was generated in PyMol using the single RBD ‘up’ state structure. Mutations were made in PyMol⁴⁴. Coordinates were then fit manually in Coot⁴⁵ following iterative refinement using Phenix⁴⁶ real space refinement and subsequent manual coordinate fitting in Coot. Structure and map analysis was performed using PyMol and Chimera.

### REFERENCES

[0290] 1 Hoffmann, M. et al. SARS-CoV-2 Cell Entry Depends on ACE2 and TMPRSS2 and Is Blocked by a Clinically Proven Protease Inhibitor. Cell 181, 271-280 e278, doi:10.1016/j.cell.2020.02.052 (2020).
[0291] 2 Kirchdoerfer, R. N. et al. Pre-fusion structure of a human coronavirus spike protein. Nature 531, 118-121, doi:10.1038/nature17200 (2016).
[0292] 3 Wrapp, D. et al. Cryo-EM structure of the 2019-nCoV spike in the prefusion conformation. Science 367, 1260-1263, doi:10.1126/science.abb2507 (2020).
[0293] 4 Yuan, Y. et al. Cryo-EM structures of MERS-CoV and SARS-CoV spike glycoproteins reveal the dynamic receptor binding domains. Nature Communications 8, 15092, doi:10.1038/ncomms15092 (2017).
[0294] 5 Gui, M. et al. Cryo-electron microscopy structures of the SARS-CoV spike glycoprotein reveal a prerequisite conformational state for receptor binding. Cell Research 27, 119-129, doi:10.1038/cr.2016.152 (2017).
[0295] 6 Song, W., Gui, M., Wang, X. & Xiang, Y. Cryo-EM structure of the SARS coronavirus spike glycoprotein in complex with its host cell receptor ACE2. PLOS Pathogens 14, e1007236, doi:10.1371/journal.ppat.1007236 (2018).
[0296] 7 Kirchdoerfer, R. N. et al. Stabilized coronavirus spikes are resistant to conformational changes induced by receptor recognition or proteolysis. Scientific Reports 8, 15701, doi:10.1038/s41598-018-34171-7 (2018).
[0297] 8 Walls, A. C. et al. Unexpected Receptor Functional Mimicry Elucidates Activation of Coronavirus Fusion. Cell 176, 1026-1039.e1015, doi:https://doi.org/10.1016/j.cell.2018.12.028 (2019).
[0298] 9 Pallesen, J. et al. Immunogenicity and structures of a rationally designed prefusion MERS-CoV spike antigen. Proceedings of the National Academy of Sciences 114, E7348, doi:10.1073/pnas.1707304114 (2017).
[0299] 10 Tortorici, M. A. et al. Structural basis for human coronavirus attachment to sialic acid receptors. Nature Structural & Molecular Biology 26, 481-489, doi:10.1038/s41594-019-0233-y (2019).
[0300] 11 Walls, A. C. et al. Cryo-electron microscopy structure of a coronavirus spike glycoprotein trimer. Nature 531, 114-117, doi:10.1038/nature16988 (2016).
[0301] 12 Pallesen, J. et al. Immunogenicity and structures of a rationally designed prefusion MERS-CoV spike antigen. Proc Natl Acad Sci USA 114, E7348-E7357, doi:10.1073/pnas.1707304114 (2017).
[0302] 13 Walls, A. C. et al. Structure, Function, and Antigenicity of the SARS-CoV-2 Spike Glycoprotein. Cell, doi:https://doi.org/10.1016/j.cell.2020.02.058 (2020).
[0303] 14 Wrapp, D. et al. Cryo-EM structure of the 2019-nCoV spike in the prefusion conformation. Science 367, 1260, doi:10.1126/science.abb2507 (2020).
[0304] 15 Walls, A. C. et al. Structure, Function, and Antigenicity of the SARS-CoV-2 Spike Glycoprotein. Cell 181, 281-292 e286, doi:10.1016/j.cell.2020.02.058 (2020).
[0305] 16 Rey, F. A. & Lok, S.-M. Common Features of Enveloped Viruses and Implications for Immunogen Design for Next-Generation Vaccines. Cell 172, 1319-1334, doi:10.1016/j.cell.2018.02.054 (2018).
[0306] 17 de Taeye, Steven W. et al. Immunogenicity of Stabilized HIV-1 Envelope Trimers with Reduced Exposure of Non-neutralizing Epitopes. Cell 163, 1702-1715, doi:https://doi.org/10.1016/j.cell.2015.11.056 (2015).
[0307] 18 He, L. et al. HIV-1 vaccine design through minimizing envelope metastability. Science advances 4, eaau6769-eaau6769, doi:10.1126/sciadv.aau6769 (2018).
[0308] 19 Zhang, P. et al. Interdomain Stabilization Impairs CD4 Binding and Improves Immunogenicity of the HIV-1 Envelope Trimer. Cell Host & Microbe 23, 832-844.e836, doi:https://doi.org/10.1016/j.chom.2018.05.002 (2018).
[0309] 20 Chuang, G.-Y. et al. Structure-Based Design of a Soluble Prefusion-Closed HIV-1 Env Trimer with Reduced CD4 Affinity and Improved Immunogenicity. Journal of Virology 91, doi:10.1128/JVI.02268-16 (2017).
[0310] 21 Torrents de la Pella, A. et al. Improving the Immunogenicity of Native-like HIV-1 Envelope Trimers by Hyperstabilization. Cell reports 20, 1805-1817, doi:10.1016/j.celrep.2017.07.077 (2017).
[0311] 22 Medina-Ramirez, M. et al. Design and crystal structure of a native-like HIV-1 envelope trimer that engages multiple broadly neutralizing antibody precursors in vivo. The Journal of Experimental Medicine 214, 2573, doi:10.1084/jem.20161160 (2017).
[0312] 23 Steichen, J. M. et al. HIV Vaccine Design to Target Germline Precursors of Glycan-Dependent Broadly Neutralizing Antibodies. Immunity 45, 483-496, doi:10.1016/j.immuni.2016.08.016 (2016).
[0313] 24 Kulp, D. W. et al. Structure-based design of native-like HIV-1 envelope trimers to silence non-neutralizing epitopes and eliminate CD4 binding. Nature Communications 8, 1655, doi:10.1038/s41467-017-01549-6 (2017).
[0314] 25 Yang, L. et al. Structure-Guided Redesign Improves NFL HIV Env Trimer Integrity and Identifies an Inter-Protomer Disulfide Permitting Post-Expression Cleavage. Frontiers in Immunology 9, 1631 (2018).
[0315] 26 Sharma, S. K. et al. Cleavage-independent HIV-1 Env trimers engineered as soluble native spike mimetics for vaccine design. Cell reports 11, 539-550, doi:10.1016/j.celrep.2015.03.047 (2015).
[0316] 27 Guenaga, J. et al. Structure-Guided Redesign Increases the Propensity of HIV Env To Generate Highly Stable Soluble Trimers. Journal of Virology 90, 2806, doi:10.1128/JVI.02652-15 (2016).
[0317] 28 Sliepen, K. et al. Structure and immunogenicity of a stabilized HIV-1 envelope trimer based on a group-M consensus sequence. Nature communications 10, 2355-2355, doi:10.1038/s41467-019-10262-5 (2019).
[0318] 29 Korber, B. et al. Spike mutation pipeline reveals the emergence of a more transmissible form of SARS-CoV-2. bioRxiv, 2020.2004.2029.069054, doi:10.1101/2020.04.29.069054 (2020).
[0319] 30 Zost, S. J. et al. Rapid isolation and profiling of a diverse panel of human monoclonal antibodies targeting the SARS-CoV-2 spike protein. bioRxiv, 2020.2005.2012.091462, doi:10.1101/2020.05.12.091462 (2020).
[0320] 31 Brouwer, P. J. M. et al. Potent neutralizing antibodies from COVID-19 patients define multiple targets of vulnerability. bioRxiv, 2020.2005.2012.088716, doi:10.1101/2020.05.12.088716 (2020).
[0321] 32 Wang, L. et al. Importance of Neutralizing Monoclonal Antibodies Targeting Multiple Antigenic Sites on the Middle East Respiratory Syndrome Coronavirus Spike Glycoprotein To Avoid Neutralization Escape. Journal of virology 92, e02002-02017, doi:10.1128/JVI.02002-17 (2018).
[0322] 33 Yuan, M. et al. A highly conserved cryptic epitope in the receptor binding domains of SARS-CoV-2 and SARS-CoV. Science 368, 630, doi:10.1126/science.abb7269 (2020).
[0323] 34 Humphrey, W., Dalke, A. & Schulten, K. VMD: Visual molecular dynamics. Journal of Molecular Graphics 14, 33-38, doi:https://doi.org/10.1016/0263-7855(96)00018-5 (1996).
[0324] 35 Team, R. C. R: A Language and Environment for Statistical Computing. (2017).
[0325] 36 Park, Y.-J. et al. Structures of MERS-CoV spike glycoprotein in complex with sialoside attachment receptors. Nature Structural & Molecular Biology 26, 1151-1157, doi:10.1038/s41594-019-0334-7 (2019).
[0326] 37 Schrödinger Release 2020-1: Maestro (Schrödinger, LLC, New York, NY, 2020).
[0327] 38 Madhavi Sastry, G., Adzhigirey, M., Day, T., Annabhimoju, R. & Sherman, W. Protein and ligand preparation: parameters, protocols, and influence on virtual screening enrichments. Journal of Computer-Aided Molecular Design 27, 221-234, doi:10.1007/s10822-013-9644-8 (2013).
[0328] 39 Salam, N. K., Adzhigirey, M., Sherman, W. & Pearlman, D. A. Structure-based approach to the prediction of disulfide bonds in proteins. Protein Engineering, Design and Selection 27, 365-374, doi:10.1093/protein/gzu017 (2014).
[0329] 40 Beard, H., Cholleti, A., Pearlman, D., Sherman, W. & Loving, K. A. Applying Physics-Based Scoring to Calculate Free Energies of Binding for Single Amino Acid Mutations in Protein-Protein Complexes. PLOS ONE 8, e82849, doi:10.1371/journal.pone.0082849 (2013).
[0330] 41 Suloway, C. et al. Automated molecular microscopy: the new Leginon system. J Struct Biol 151, 41-60, doi:10.1016/j.jsb.2005.03.010 (2005).
[0331] 42 Punjani, A., Rubinstein, J. L., Fleet, D. J. & Brubaker, M. A. cryoSPARC: algorithms for rapid unsupervised cryo-EM structure determination. Nat Methods 14, 290-296, doi:10.1038/nmeth.4169 (2017).
[0332] 43 Pettersen, E. F. et al. UCSF Chimera—A visualization system for exploratory research and analysis. Journal of Computational Chemistry 25, 1605-1612, doi:10.1002/jcc.20084 (2004).
[0333] 44 Schrodinger, L. The PyMOL Molecular Graphics System. (2015).
[0334] 45 —Features and development of Coot. —Acta crystallographica. Section D, Biological crystallography -66, -486-501, doi:-(2010).
[0335] 46 Afonine, P. V. et al. Real-space refinement in PHENIX for cryo-EM and crystallography. Acta Crystallographica Section D 74, 531-544, doi:10.1107/S2059798318006551 (2018).

### Example 3B

[0336] Without being bound by theory, the results in Example 2 indicate that the rs2d can require further modifications. FIG. 53 shows 383C D985C (RBD to S2 double mutant (rS2d) design comprising additional mutations referenced as hexapro mutations. Hexapro mutations are discussed in See Hsieh et al. Science 18 Sep. 2020: Vol. 369, Issue 6510, pp. 1501-1505, DOI: 10.1126/science.abd0826.

[0337] Rs2d designs comprising hexapro mutations are evaluated and discussed in Edwards et al. Nature Structural & Molecular Biology volume 28, pages128-131(2021).

[0338] FIG. 10 and Table 9B, show SARS-2 designs comprising additional modifications selected from the Cluster designs described in FIG. 8.

[0339] Any of the SARS-2 designs will be expressed as nucleic acids or proteins will be expressed, characterized and tested for antigenicity and immunogenicity. Immuonogenicity studies include animal challenge studies.

### Example 4

[0340] Glycans on the SARS-CoV-2 Spike Control the Receptor Binding Domain

[0341] Conformation

[0342] Abstract

[0343] The glycan shield of the beta-coronavirus (β-CoV) Spike (S) glycoprotein provides protection from host immune responses, acting as a steric block to potentially neutralizing antibody responses. The conformationally dynamic S-protein is the primary immunogenic target of vaccine design owing to its role in host-cell fusion, displaying multiple receptor binding domain (RBD) ‘up’ and ‘down’ state configurations. Here, we investigated the potential for RBD adjacent, N-terminal domain (NTD) glycans to influence the conformational equilibrium of these RBD states. Using a combination of antigenic screens and high-resolution cryo-EM structure determination, we show that an N-glycan deletion at position 234 results in a dramatically reduced population of the ‘up’ state RBD position. Conversely, glycan deletion at position N165 results in a discernable increase in ‘up’ state RBDs. This indicates the glycan shield acts not only as a passive hinderance to antibody meditated immunity but also as a conformational control element. Together, our results demonstrate this highly dynamic conformational machine is responsive to glycan modification with implications in viral escape and vaccine design.

[0344] Introduction

[0345] The ongoing SARS-CoV-2 (SARS-2) pandemic presents an urgent need for the development of a protective vaccine. The primary immunogenic target for the vaccines in development is the viral transmembrane S-protein trimer. Each protomer of the trimer is split into an N-terminal receptor binding S1 subunit and a C-terminal fusion element containing S2 subunit, demarcated by the presence of a host protease cleavage site. The S1 subunit is further split into an N-terminal domain (NTD), two subdomains (SD1 and SD2) as well as the receptor binding domain (RBD) that together cap the conserved elements of the S2 subunit. The fusion event is marked by the shedding of the S1 subunit and large conformational transitions in the S2 subunit. The necessity to maintain a large free energy gradient between the prefusion, immune protective state of the molecule and the post-fusion state results in a highly dynamic macromolecular structure. The S1 subunit is dynamic, presenting the RBD in two distinct states: a receptor binding site occluded ‘down’ state in which the RBDs rest against their adjacent protomer's NTD, and a receptor binding site exposed ‘up’ state. It is this RBD ‘up’ state to which the majority of neutralizing responses are observed in convalescent SARS-2 infected individuals′. As conformational evasion is a well-known virus escape mechanism, it is critical to understand the mechanism by which the dynamics are controlled.

[0346] Structural studies of the β-CoV S-protein have focused primarily on a soluble, ectodomain construct with and without stabilizing proline mutations (2P). This includes structures for SARS-2^{1,2}, SARS³⁻⁷, MERS^{3,8}, and other human^{9,10} and murine¹¹ β-CoV ectodomains. Structures for the SARS and MERS ectodomains revealed the presence of one and two RBD ‘up’ states with a three RBD ‘up’ state observed in the MERS ectodomain demonstrating the breadth of RBD configurations available to the spike. Interestingly, these states were not observed in the human β-CoVs HKU1 and OC43 nor in a Murine β-CoV, indicating mutations in the spike protein can confer dramatic differences in the propensity of the RBD to sample its available conformational space.

[0347] Our quantitative examination of the available β-CoV S-protein structures recently revealed the S1 and S2 subunit domains of different β-CoV viruses occupy a diverse array of configurations¹². Based upon this analysis we predicted the S-protein conformation was sensitive to mutations at the interfaces between domains and subunits. Indeed, mutations at these sites had major impacts on the configuration of the protein, especially on the RBD ‘up’/‘down’ distribution¹². While these and other studies^{13,14,15} have demonstrated the role of protein-protein contacts in determining the conformation of the S-protein, the influence on RBD configuration of glycosylation at or near interfacial domain regions is poorly understood.

[0348] Like other class I viral fusion proteins, the β-CoV S-proteins are heavily glycosylated, obscuring the spike surface and limiting the targetable area for immune responses. A recent site-specific analysis of the glycosylation patterns of the SARS-2 S-protein revealed variation in the glycan type, indicating marked differences in processing enzyme accessibility at each site¹⁶. Together, the wide variation in spike conformation coupled with the presence of glycans adjacent to the RBD indicates among the many factors affecting the RBD position, glycosylation patterns can provide a means by which to control its conformational equilibrium.

[0349] In this study we have investigated the potential for two SARS-2 NTD glycans in close proximity to the RBD to influence the conformational distribution of the RBD ‘up’ and ‘down’ states. Analysis of the available SARS-2 ‘up’ state structures indicated N165 and N234 glycans can interact with the ‘up’ state RBD acting as both direct stabilizers of the ‘up’ state and as steric blocks to transitions to the ‘down’ state. We combined binding studies by surface plasmon resonance, with structural studies using negative stain electron microscopy (NSEM) and single-particle cryo-electron microscopy (cryo-EM) to define shifts in the ‘up’/‘down’ state equilibrium in glycan-deleted mutants of the SARS-2 spike ectodomain. Together, our results demonstrate that RBD proximal glycans can influence the propensity of the S-protein adopt multiple configurations indicating a means for viral escape and therefore the need to consider non-RBD neutralizing responses in vaccine design.

[0350] Results

[0351] Structure Analysis Identifies Glycans with the Potential to Modify the S-Protein Conformation

[0352] In order to establish whether glycans can indeed alter the RBD orientation, we first examined the SARS-2 glycan density at positions 165 and 234 in the cryo-EM maps from three previously published SARS-2 structures. In the ‘down’ state, the N234 glycan resides in a cleft formed by the NTD and RBD (FIG. 41A) while in the ‘up’ state, it occupies the region of the RBD ‘down’ state (FIG. 37A). This indicates that the solvated ‘up’ state configuration is preferred and must be shifted in order to accommodate the ‘down’ state. The presence of this glycan can act as a hinderance to ‘up’-to-‘down’ state transitions while sterically hindering the ‘down’ state by limiting RBD to NTD packing. An additional glycan at N165 residing toward the apical position of the NTD is in close proximity to the RBD and therefore can also influence the RBD position. Unlike the N234 glycan, the position of the N165 glycan presents no apparent restriction to the RBD positioning in the ‘down’ state (FIG. 41B). However, clear density for this glycan is observed occupying the region the RBD rest in the closed state, potentially forming interactions with the ‘up’ state RBD (FIG. 37A). This indicates this glycan can act to stabilize the RBD ‘up’ state. Alternatively, its presence near the RBD in the ‘down’ state can confer a degree of stability to the fully closed state. Together, these observations combined with our recent results indicating remarkable conformational sensitivity to mutations indicate these glycans can act to stabilize the observed RBD ‘up’/‘down’ equilibrium. We next asked whether RBD proximal NTD glycans occur in other β-CoVs for which high-resolution structural data is available. For this, we examined structures for MERS, SARS, OC43, HKU1, and a Murine β-CoV S-protein ectodomains, identifying three MERS (N155, N166, and N236), two SARS-2 synonymous SARS (N158 and N227), and one OC43 (N133), and two HKU1 (N132 and N19) glycosylation sites proximal to their respective RBDs (FIG. 37B). No RBD adjacent glycosylation sites were observed in the Murine S-protein. While the MERS and SARS glycans display similar extensions into the RBD space in the one ‘up’ state, the OC43 and HKU1 glycans do not. For example, while the HKU1 N132 glycan was poorly resolved, the OC43 N133 glycan occupying the same relative position is observed to extend upward, away from the RBD indicating this glycan does not influence the RBD conformation (FIG. 41C). Interestingly, while cryo-EM reconstructions for SARS-2, MERS, and SARS yield ‘up’ state RBDs, these states were not reported for any of the OC43, HKU1, or Murine datasets. Together, these observations indicate RBD proximal NTD glycans can indeed affect the conformational distribution of ‘up’/‘down’ RBD states.

[0353] RBD Conformation and Antigenicity of the N-Glycan Deleted S-Proteins Reveals Differential Stabilization of RBD ‘Up’ and ‘Down’ States

[0354] In order to examine the extent to which the N234 and N165 glycans influence the conformational distribution of the S-protein, we produced di-proline (2P) stabilized⁸ S-protein ectodomain² N234A and N165A mutants.

[0355] The parent nCoV sequence (“nCoV-1 nCoV-2P”) is shown in FIG. 54A.

[0356] The N165A mutant sequence is shown in FIG. 54B.

[0357] The N234A mutant sequence is shown in FIG. 54C.

[0358] The protein yields after StrepTactin purification were 2.0 mg and 0.8 mg per 1 L culture supernatant, respectively for the N234A and the N165A mutant. (FIGS. 42 and 43). To assess the reactivity of the glycan-deleted spike ectodomain mutants to the ACE-2 receptor, we tested binding of the spike to an ACE-2 ectodomain construct bearing a C-terminal mouse Fc tag immobilized on an anti-Fc surface. SPR binding assays showed that while the N165A mutant displayed ˜10-20% increased binding levels to the unmutated constructs while the N234A mutant showed a decrease of ˜50-60% relative to unmutated construct levels (FIG. 38A and FIG. 42B). Because ACE-2 binding requires the RBD be in the up position, the SPR data indicates that the N165A mutant is more up (or open), whereas the N2345A mutant is more down (or closed).

[0359] We next examined the ‘up’/‘down’ state distribution of both mutants via negative stain electron microscopy (NSEM). Heterogenous classification of the N234A mutant particles revealed a dramatic shift from a ˜1:1 ‘up’ v. ‘down’ state distribution in the unmutated 2P^{2,12,17} to a ratio of ˜1:4 in the down state (FIG. 38A). Remarkably, the N165A mutant shifted the distribution in the opposite direction, displaying a higher propensity to adopt RBD “up” states yielding a ˜2:1 -‘up’ state to ‘down’ state ratio, with ˜17% of the “up” population being a 2-RBD “up” class (FIG. 38A). Together, the ACE-2 binding and the NSEM results demonstrated that both NTD N-glycan deletions have distinct impacts on the RBD distribution.

[0360] High-Resolution Cryo-EM Structures of the N-Glycan Deleted Constructs Indicates Modest Perturbation to S-Protein Configuration

[0361] We next turned to cryo-EM for high resolution structure determination to visualize the impact of the glycan deletions on the local and global configuration of the S-protein domains. We collected and processed 7,269 and 8,068 images for the N165A and N234A mutant, respectively, to yield particle stacks cleaned up by 2D classification, that were then subjected to multiple rounds of ab initio classification and heterogenous refinement in cryoSPARC¹⁸ using 20 Å low pass filtered ‘up’ state and ‘down’ state maps generated from available SARS-2 structures. Initial maps for high resolution refinement were generated from sorted particles via ab initio reconstruction (FIGS. 44 and 45). The resulting particle distribution for the N234A mutant was predominantly ‘down’ with a minor, ˜6%, ‘up’ state population while that of the N165A mutant was ˜50% ‘down’ and 50% one ‘up’ as was observed for the unmutated spike previously^{2,12,17}. We were unable to identify a particle subset corresponding to a two ‘up’ state in the cryo-EM dataset. The ‘up’/‘down’ state populations obtained via NSEM for unmutated¹², glutaraldehyde fixed SARS-2 S-protein ectodomain match the previously observed cryo-EM distribution¹⁷. Here, using the same approach, we find that these distributions are dramatically and differentially shifted with mutation of the N165 or N234 to alanine with the SPR, NSEM, and cryo-EM distribution tracking in the same direction with the exception of the N165A cryo-EM particles for which a two RBD ‘up’ state was not observed. Considering the concordance between the SPR and NSEM results, this can be due to particle processing and the potential for a relatively disordered ‘up’ state RBDs in the two ‘up’ state with the glycan deletion.

[0362] We next examined the high-resolution details of the cryo-EM maps. Refinement of the N234A mutant ‘down’ state using C3 symmetry resulted in a 3.0 Å map with coordinates fit to this map yielding a structure aligning to the unmutated 2P structure (PDB ID 6VXX) with a ˜0.6 Å RMSD. Alignment of the S2 subunit revealed the structures to be nearly identical in these regions (RMSD ˜0.4 Å). Examination of the NTD to RBD interface using this alignment revealed a shift of the NTD toward the RBD (FIG. 39A-D). Weak density for the N165 glycan was observed indicative of an overall similar position relative to that observed previously (FIGS. 39B and C) The one RBD ‘up’ state map was refined to 4.8 Å resolution using C1 symmetry. Comparison of the one RBD ‘up’ state structure fit to this map to its unmutated counterpart (PDB ID 6VYB) indicates a slight shift of the RBD with the N234A mutation (FIGS. 39E and F). However, the limited resolution of this structure limits close examination of this movement. Nevertheless, density for the N165 glycan was observed for the NTD adjacent to the vacant RBD site (‘up’ adjacent) and for the NTD glycan adjacent to the ‘down’ state RBD proximal to the vacant site (‘down’ free). Each occupies a configuration consistent with previous observations in the unmutated form. Interestingly, clear density for the N165 glycan is not observed for the NTD adjacent to the ‘down’ state RBD contacting the ‘up’ state RBD (‘down’ adjacent). Together, the structures show that the while clear differences between the unmutated and N234A mutant are observed, the overall configuration of the structures are similar to their respective unmutated counterparts. These differences do not appear to have significant impacts on the N165 glycan configuration.

[0363] Refinement of the N165A ‘up’ and ‘down’ states resulted in maps with resolutions of 3.6 Å using C1 symmetry and 3.3 Å using C3 symmetry, respectively. Similar to the N234A mutant, the N165A mutant structures showed an overall similar arrangement of the various domains. Alignment of the ‘down’ state structure of the N165A mutant with that of the unmutated spike yielded an RMSD of 0.81 Å with an S2 subunit alignment RMSD of 0.36 Å. Unlike the N234A mutant, the N165A mutant NTD is shifted away from the adjacent RBD (FIG. 40A-D). Interestingly, clear density for the N234 glycan was not observed. The one ‘up’ state structure of the N165A mutant displayed a similar (FIG. 46), albeit slightly less shifted, arrangement of the NTD in the ‘down’ adjacent protomer (FIG. 46B). This shift is not observed in the other two NTDs indicating the NTD shift is sensitive to S1 and S2 subunit arrangements (FIGS. 46C and D). The 1-‘up’ RBD resides in largely the same position as that of the unmutated spike with only minor differences due potentially to the lower relative resolution of this region (FIG. 40E-H). Density for the N234 glycan was not observed for any of the protomers, consistent with the ‘down’ state map. Together, the results of the N165A and N234A structural analysis results indicates that these two glycans play a differential role in influencing the SARS-CoV-2 RBD arrangement, shifting the NTD toward or away from the adjacent RBDs.

[0364] Discussion

[0365] Viral fusion proteins are often heavily glycosylated with the SARS-2 S-protein being no exception. Though decorated with fewer glycans than the HIV-1 Envelope protein, with 22 glycans per protomer¹⁶, the SARS-2 spike is well shielded from immune surveillance. The SARS-2 spike protein has proven remarkably sensitive to domain-domain interfacial mutations^{12-15,19} which led us to ask whether glycans near the NTD-RBD interface can also impact the configuration of the spike. Here we have investigated the role of two NTD glycans at positions 234 and 165 in modulating S protein conformational dynamics by tracking the shift of RBD disposition in glycan-deleted mutants using binding to ACE-2 receptor, NSEM and cryo-EM analysis. While the specific magnitudes of differences vary between the different analysis methods, all the results track in the same direction to show that deletion of glycan 234 shifts the RBD dynamics more toward the “down” state, whereas deletion of glycan 165, retains or slightly enhances the distribution toward more “up” states. The 2-RBD “up” state observed in the NSEM analysis was not found in the cryo-EM data, indicating that the RBD up/down configuration in this construct can be sensitive to its environment. The shift in the position of the NTD toward the RBD in the ‘down’ state N234A mutant indicates the N234 glycan plays a direct role in destabilizing the ‘down’ state RBD position such that removal allows tighter packing of the RBD to the NTD. Additionally, the observed shift in the position of the ‘up’ state RBD indicates a role for the N234 glycan in modulating RBD stability. This is consistent with a recently released theoretical study investigating ‘up’ state RBD sensitivity to the presence of N165/N234 glycans via molecular simulation²⁰. This investigation found that the absence of these glycans resulted in a comparatively unstable ‘up’ state RBD. The results here confirm the prediction from these simulations that loss of the N234 glycan results in an increased prevalence of the ‘down’ state. Deletion of the glycan at position 165 here indicates an opposite effect on the conformation of the spike relative to the N234A mutant, with the NTD shifting away from the adjacent RBD. Though this appears to relieve strain caused by the restriction imposed by the N234 glycan, the resultant lack of packing between the RBD and NTD can be sufficient to favor transitions to the ‘up’ state. Further, this shift indicates the N165 glycan interacts directly with the RBD. Though direct interactions are not observed in the cryo-EM densities here or in previously published SARS-2 structures, the presence of ‘down’ state conformational heterogeneity evinced by the poor resolution of the RBD and NTD elements of the spike is consistent with the possibility of such an interaction. A more detailed examination of this heterogeneity and the influence of these glycans on the various states of the spike will require large datasets with improved orientational sampling to better resolve these apical regions. Nevertheless, the results here demonstrate that the conformational ensemble of the SARS-2 spike and β-CoV spikes are sensitive to glycosylation patterns, especially near the NTD-RBD interface.

[0366] Our results from this study lend insights into two key questions—what role do the glycans at positions 165 and 234 play in modulating RBD dynamics and the biology of the native SARS-2 spike and how do these findings impact vaccine design? Toward the first question, we recognize that the results we describe are in the context of a stabilized, ectodomain construct and differences between these and what occurs on the spike in its native context can be determined. Indeed, a recent report for a detergent solubilized, full-length SARS-2 spike indicated greater stability in the ‘down’ state RBD²¹. Yet our experimental results revealing the role of the N165 and N234 glycans in modulating the conformational landscape of the S protein, taken together with the findings from the computational analysis performed in the context of the full-length spike²⁰, and our analysis of the RBD-proximal NTD glycans of diverse β-CoVs (FIG. 37), provides strong support for a role for these glycans in controlling S protein conformation and dynamics. The differences in glycosylation in this region in different CoV spikes can be a contributor to determining their receptor specificity and thus their transmission. Toward the second question related to the utility for vaccine design, building upon our previous study where we demonstrated conformational control of RBD dynamics in the S protein ectodomain by modulating inter-domain protein-protein contacts, here we expand the tools for achieving such control to glycan-protein interactions, and demonstrate that RBD dynamics can be modulated by targeting key glycans at interdomain contacts. In so doing, we create two new ectodomain constructs with differential exposure of the immunodominant RBD for use as immunogens in vaccination regimens. Taken together, these investigations further demonstrate the remarkable plasticity of this conformational machine and indicate the S-protein has a diverse landscape of conformational escape mutations from which to select as genetic drift and host immune pressures direct its evolution.

[0367] Studies have shown that the NTD and RBD are quite mobile. We therefore asked whether the observed shifts in the NTD of the N165A and N234A mutants in the ‘down’ state are related to changes in the propensity of the domain to occupy positions or due to access to new states. We first classified the ‘down’ state 2P, N165A, and N234A particles using C1 symmetry yielding 4, 4, and 3 states, respectively. In order to quantify differences in the positions of the S1 domains, we generated a set of vectors between protomer RBD's and SD1's centroids and their adjacent NTD's centroids (FIGS. 47A and B).

[0368] Vector magnitudes and relevant angles and dihedrals were determined for each of the three RBD-NTD pairings. Examination of the distance between adjacent RBDs and NTDs revealed markedly shifted positions between the three constructs (FIG. 47C). The geometric mean distance of the 2P construct positions was 35.0 Å compared to 33.6 Å for the N165A construct and 33.9 Å for the N234A construct. The N234A results appeared roughly bimodal with a population average near that of the 2P construct of 34.7 Å and another nearer the N165A average with an average of 33.3 Å. A single 2P RBD-NTD pair reached this N165A like state. The N165A mutant displayed a tight distribution with a standard deviation of 0.2 Å compared to 0.6 Å and 0.8 Å for the 2P and N234A constructs, respectively. We next examined the disposition of the NTD relative to the RBD via a dihedral about the SD1 and NTD′ vector.

[0369] The results indicate the 2P and N165A constructs display similar angles with geometric means of 52.9 And 53.0 Å, respectively (FIG. 47D). As in the RBD to NTD distance metric, the N234A construct displays a bimodal distribution, one close to that of the 2P and N165A constructs with a geometric mean of 53.4 Å and another with a geometric mean of 48.5 Å. Two of the 2P RBD-NTD pairings display values near this lower angle state. As observed for the RBD-NTD distance metric, the N165A construct displays a tight distribution (1.0 Å SD) while those of the 2P and N234A are wider (1.8 and 2.7 Å, respectively). We next projected the vector dataset using the principal components analysis method (PCA) to examine aggregate differences between the pairing arrangements. The N165A pairings separated from the 2P and N234A along principal component one while principal component two provided limited separation between the 2P and N234A constructs. Examination of the pairings within each structure revealed marked similarity between N165A pairs while those of the 2P and N234A constructs largely dissimilar. This indicated that the N165A states were more symmetric than those of 2P and N234A constructs. Visualization of the alignments of the S2 regions of each construct's coordinates is consistent with this observation (FIG. 47F). These results indicate the N165 glycan plays a role in stabilizing asymmetric S1 arrangements while the N234 glycan appears to affect the relative stabilities of these states.

[0370] A previous molecular dynamics-based study of the one ‘up’ state RBD indicated the N165 glycan “props up” the RBD. We therefore classified the 2P and N165A construct ‘up’ states in order to determine the extent to which the RBD positions. Each classified into four states with some overlap in the relative position of the RBDs. However, the 2P construct displayed an RBD more distant from the primary trimer axis as compared to those of the N165A construct while the N165A construct displayed a state much closer to the primary axis (FIG. 48A). This is exemplified in the ϕ3 dihedral which shows that, while each contains three states that are quite similar, the 2P trimer axis distant state and the N165A close state differ (FIG. 48B). This is consistent with the previous observations, indicated the N165 glycan indeed limits access of the RBD to S2 region of the trimer. We next performed a PCA analysis of the ‘up’ state vectors. Principal component one separates the ‘up’ and ‘down’ state pairing while principal component two separates the two constructs (FIG. 48C). This indicates that the N165 glycan plays a role in not only propping up the RBD but also in determining the arrangement of the S1 domains.

[0371] Methods

[0372] Vector Based Analysis

[0373] Vector analysis was performed as previously described. Specifically, Cα centroids for the S1 NTD, RBD, S131, SD2 (SARS-CoV-2 residues, 27-43 and 54-271, 330-443 and 503-528, 323-329 and 529-590, 294-322 and 591-696, respectively) as well as a β-sheet motif in the NTD (residues 116-129 and 169-172) and a helix motif in the RBD (residues 403-410) were determined. The NTD was split into two regions with the SD1 contacting, SD2 adjacent portion referred to here as the NTD′ (residues 44-53 and 272-293). Cα centroids in the S2 subunit were obtained for a β-sheet motif (residues 717-727 and 1047-1071) and the CD domain (711-716 and 1072-1122). Vector magnitudes, angles, and dihedrals between these centroids were determined and used in the subsequent analysis. Vector analysis was performed using the VMD²² Tcl interface.

[0374] Protein Expression and Purification

[0375] The SARS-CoV-2 ectodomain constructs were produced and purified as described previously². Briefly, a gene encoding residues 1-1208 of the SARS-CoV-2 S (GenBank: MN908947) with proline substitutions at residues 986 and 987, a “GSAS” substitution at the furin cleavage site (residues 682-685), a C-terminal T4 fibritin trimerization motif, an HRV3C protease cleavage site, a TwinStrepTag and an 8XHisTag (SEQ ID NO: 4) was synthesized and cloned into the mammalian expression vector pall. All mutants were introduced in this background. Expression plasmids encoding the ectodomain sequence were used to transiently transfect FreeStyle293F cells using Turbo293 (SpeedBiosystems). Protein was purified on the sixth day post-transfection from the filtered supernatant using StrepTactin resin (IBA).

[0376] The ACE-2 gene was cloned as a fusion protein with a mouse Fc region attached to its C-terminal end. A 6× His-tag (SEQ ID NO: 5) was added to the C-terminal end of the Fc domain. ACE-2 with mouse FC tag was purified by Ni-NTA chromatography.

[0377] Thermal Shift Assay

[0378] The thermal shift assay was performed using Tycho NT. 6 (NanoTemper Technologies). Spike variants were diluted (0.15 mg/ml) in nCoV buffer (2 mM Tris, pH 8.0, 200 mM NaCl, 0.02% sodium azide) and run in duplicates in capillary tubes. Intrinsic fluorescence was recorded at 330 nm and 350 nm while heating the sample from 35-95° C. at a rate of 3° C./min. The ratio of fluorescence (350/330 nm) and the Ti were calculated by Tycho NT. 6.

[0379] Cryo-EM Sample Preparation, Data Collection and Processing

[0380] Purified SARS-CoV-2 spike preparations were diluted to a concentration of ˜1 mg/mL in 2 mM Tris pH 8.0, 200 mM NaCl and 0.02% NaN3. 2.5 μL of protein was deposited on a CF-1.2/1.3 grid that had been glow discharged for 30 seconds in a PELCO easiGlow™ Glow Discharge Cleaning System. After a 30 s incubation in >95% humidity, excess protein was blotted away for 2.5 seconds before being plunge frozen into liquid ethane using a Leica EM GP2 plunge freezer (Leica Microsystems). Frozen grids were imaged in a Titan Krios (Thermo Fisher) equipped with a K3 detector (Gatan). Data were acquired using the Leginon system²³. The dose was fractionated over 50 raw frames and collected at 50 ms framerate. This dataset was energy-filtered with a slit width of 30 eV. Individual frames were aligned and dose-weighted′. CTF estimation, particle picking, 2D classifications, ab initio model generation, heterogeneous refinements, homogeneous 3D refinements and local resolution calculations were carried out in cryoSPARC²⁵.

[0381] Cryo-EM Structure Fitting and Analysis

[0382] Structures of the all ‘down’ state (PDB ID 6VXX) and single RBD ‘up’ state (PDB ID 6VYB) from the previously published SARS-CoV-2 ectodomain were used to fit the cryo-EM maps in Chimera²⁶. Mutations were made in PyMol²⁷. Coordinates were fit to the maps first using ISOLDE²⁸ followed by iterative refinement using Phenix²⁹ real space refinement and subsequent manual coordinate fitting in Coot as needed. Structure and map analysis were performed using PyMol, Chimera²⁶ and ChimeraX³⁰.

[0383] Surface Plasmon Resonance

[0384] The binding of ACE-2 to the SARS-2 spike constructs was assessed by surface plasmon resonance on Biacore T-200 (GE-Healthcare) at 25° C. with HBS-EP+ (10 mM HEPES, pH 7.4, 150 mM NaCl, 3 mM EDTA, and 0.05% surfactant P-20) as the running buffer. ACE-2 tagged at its C-terminal end to a mouse Fc region was captured on an anti-Fc surface. Binding was assessed by flowing over different concentrations of the spike constructs over the ACE-2 surface. The surface was regenerated between injections by flowing over 3M MgCl2 solution for 10s with flow rate of 100 μl/min. Blank sensorgrams were obtained by injection of the same volume of HBS-EP+ buffer in place of IgGs and Fab solutions. Sensorgrams were corrected with corresponding blank curves. Sensorgram data were analyzed using the BiaEvaluation software (GE Healthcare).

### REFERENCES

[0385] 1 Barnes, C. O. et al. Structures of human antibodies bound to SARS-CoV-2 spike reveal common epitopes and recurrent features of antibodies. Cell, doi:https://doi.org/10.1016/j.cell.2020.06.025 (2020).
[0386] 2 Wrapp, D. et al. Cryo-EM structure of the 2019-nCoV spike in the prefusion conformation. Science 367, 1260-1263, doi:10.1126/science.abb2507 (2020).
[0387] 3 Yuan, Y. et al. Cryo-EM structures of MERS-CoV and SARS-CoV spike glycoproteins reveal the dynamic receptor binding domains. Nature Communications 8, 15092, doi:10.1038/ncomms15092 (2017).
[0388] 4 Gui, M. et al. Cryo-electron microscopy structures of the SARS-CoV spike glycoprotein reveal a prerequisite conformational state for receptor binding. Cell Research 27, 119-129, doi:10.1038/cr.2016.152 (2017).
[0389] 5 Song, W., Gui, M., Wang, X. & Xiang, Y. Cryo-EM structure of the SARS coronavirus spike glycoprotein in complex with its host cell receptor ACE2. PLOS Pathogens 14, e1007236, doi:10.1371/journal.ppat.1007236 (2018).
[0390] 6 Kirchdoerfer, R. N. et al. Stabilized coronavirus spikes are resistant to conformational changes induced by receptor recognition or proteolysis. Scientific Reports 8, 15701, doi:10.1038/s41598-018-34171-7 (2018).
[0391] 7 Walls, A. C. et al. Unexpected Receptor Functional Mimicry Elucidates Activation of Coronavirus Fusion. Cell 176, 1026-1039.e1015, doi:https://doi.org/10.1016/j.cell.2018.12.028 (2019).
[0392] 8 Pallesen, J. et al. Immunogenicity and structures of a rationally designed prefusion MERS-CoV spike antigen. Proceedings of the National Academy of Sciences 114, E7348, doi:10.1073/pnas.1707304114 (2017).
[0393] 9 Kirchdoerfer, R. N. et al. Pre-fusion structure of a human coronavirus spike protein. Nature 531, 118-121, doi:10.1038/nature17200 (2016).
[0394] 10 Tortorici, M. A. et al. Structural basis for human coronavirus attachment to sialic acid receptors. Nature Structural & Molecular Biology 26, 481-489, doi:10.1038/s41594-019-0233-y (2019).
[0395] 11 Walls, A. C. et al. Cryo-electron microscopy structure of a coronavirus spike glycoprotein trimer. Nature 531, 114-117, doi:10.1038/nature16988 (2016).
[0396] 12 Henderson, R. et al. Controlling the SARS-CoV-2 Spike Glycoprotein Conformation. bioRxiv, 2020.2005.2018.102087, doi:10.1101/2020.05.18.102087 (2020).
[0397] 13 Hsieh, C.-L. et al. Structure-based Design of Prefusion-stabilized SARS-CoV-2 Spikes. bioRxiv, 2020.2005.2030.125484, doi:10.1101/2020.05.30.125484 (2020).
[0398] 14 McCallum, M., Walls, A. C., Corti, D. & Veesler, D. Closing coronavirus spike glycoproteins by structure-guided design. bioRxiv, 2020.2006.2003.129817, doi:10.1101/2020.06.03.129817 (2020).
[0399] 15 Xiong, X. et al. A thermostable, closed, SARS-CoV-2 spike protein trimer. bioRxiv, 2020.2006.2015.152835, doi:10.1101/2020.06.15.152835 (2020).
[0400] 16 Watanabe, Y., Allen, J. D., Wrapp, D., McLellan, J. S. & Crispin, M. Site-specific glycan analysis of the SARS-CoV-2 spike. Science, eabb9983, doi:10.1126/science.abb9983 (2020).
[0401] 17 Walls, A. C. et al. Structure, Function, and Antigenicity of the SARS-CoV-2 Spike Glycoprotein. Cell, doi:https://doi.org/10.1016/j.cell.2020.02.058 (2020).
[0402] 18 Punjani, A., Rubinstein, J. L., Fleet, D. J. & Brubaker, M. A. cryoSPARC: algorithms for rapid unsupervised cryo-EM structure determination. Nature Methods 14, 290, doi:10.1038/nmeth.4169 https://www.nature.com/articles/nmeth.4169 #supplementary-information (2017).
[0403] 19 Zhang, L. et al. The D614G mutation in the SARS-CoV-2 spike protein reduces S1 shedding and increases infectivity. bioRxiv, 2020.2006.2012.148726, doi:10.1101/2020.06.12.148726 (2020).
[0404] 20 Casalino, L. et al. Shielding and Beyond: The Roles of Glycans in SARS-CoV-2 Spike Protein. bioRxiv, 2020.2006.2011.146522, doi:10.1101/2020.06.11.146522 (2020).
[0405] 21 Cai, Y. et al. Distinct conformational states of SARS-CoV-2 spike protein. bioRxiv, 2020.2005.2016.099317, doi:10.1101/2020.05.16.099317 (2020).
[0406] 22 Humphrey, W., Dalke, A. & Schulten, K. VMD: Visual molecular dynamics. Journal of Molecular Graphics 14, 33-38, doi:https://doi.org/10.1016/0263-7855(96)00018-5 (1996).
[0407] 23 Suloway, C. et al. Automated molecular microscopy: the new Leginon system. J Struct Biol 151, 41-60, doi:10.1016/j.jsb.2005.03.010 (2005).
[0408] 24 Zheng, S. Q. et al. MotionCor2: anisotropic correction of beam-induced motion for improved cryo-electron microscopy. Nat Methods 14, 331-332, doi:10.1038/nmeth.4193 (2017).
[0409] 25 Punjani, A., Rubinstein, J. L., Fleet, D. J. & Brubaker, M. A. cryoSPARC: algorithms for rapid unsupervised cryo-EM structure determination. Nat Methods 14, 290-296, doi:10.1038/nmeth.4169 (2017).
[0410] 26 Pettersen, E. F. et al. UCSF Chimera—A visualization system for exploratory research and analysis. Journal of Computational Chemistry 25, 1605-1612, doi:10.1002/jcc.20084 (2004).
[0411] 27 Schrodinger, L. The PyMOL Molecular Graphics System. (2015).
[0412] 28 Croll, T. ISOLDE: a physically realistic environment for model building into low-resolution electron-density maps. Acta Crystallographica Section D 74, 519-530, doi:10.1107/S2059798318002425 (2018).
[0413] 29 Afonine, P. V. et al. Real-space refinement in PHENIX for cryo-EM and crystallography. Acta Crystallographica Section D 74, 531-544, doi:10.1107/S2059798318006551 (2018).
[0414] 30 Goddard, T. D. et al. UCSF ChimeraX: Meeting modern challenges in visualization and analysis. Protein Sci 27, 14-25, doi:10.1002/pro.3235 (2018).

1. A modified SARS-2 spike protein comprising amino acid changes as described in FIG. 8, 10 or 25.

2. The modified SARS-2 spike protein of claim 1, wherein the protein comprises a recombinant protein comprising all the consecutive amino acids after the signal peptide of polypeptide sequences in FIG. 8, 10 or 25.

3. The modified SARS-2 spike protein of claim 1 comprising S383C D985C (RBD to S2 double mutant; rS2d) mutations.

4. A nucleic acid encoding the modified SARS-2 spike protein of claim 1.

5. The nucleic acid of claim 4, wherein the nucleic acid is a modified mRNA.

6. The nucleic acid of claim 5, wherein the mRNA is in a composition comprising lipid nanoparticles.

7. The nucleic acid of claim 4, wherein the nucleic acid is comprised in a vector and is operably linked to a promoter.

8. A composition comprising the modified SARS-2 spike protein of claim 2 or a nucleic acid encoding the modified SARS-2 spike protein, and a carrier.

9. (canceled)

10. A protein nanoparticle or virus-like particle (VLP), comprising the modified SARS-2 spike protein of claim 2.

11. (canceled)

12. A host cell comprising a nucleic acid molecule encoding the modified SARS-2 spike protein of claim 2.

13. An immunogenic composition comprising the modified SARS-2 spike protein of claim 1, a nucleic acid encoding the modified SARS-2 spike protein, a nanoparticle or VLP including the modified SARS-2 spike protein, and a pharmaceutically acceptable carrier.

14. A method for inducing an immune response to a SARS- 2 spike protein in a subject, comprising administering to the subject an effective amount of the modified SARS-2 spike protein of claim 1, a nucleic acid encoding the modified SARS spike protein, or a composition thereof.

15. A modified SARS-2 spike protein, comprising an amino acid sequence of an N165A variant or an N234A variant.

16. The modified SARS-2 spike protein of claim 15, comprising all the consecutive amino acids after the signal peptide of a modified SARS-2 spike protein comprising the amino acid sequence of the N165A variant or the N234A variant.

17-28. (canceled)

The application's sequence listing, which the Patent Office published only in electronic form, follows.

SEQUENCE LISTING (174 sequences)

SEQ ID NO: 1 - protein, 26 aa, Unknown
  Description of Unknown: T4 fibritin trimerization domain sequence
GYIPEAPRDGQAYVRKDGEWVLLSTF

SEQ ID NO: 2 - protein, 5 aa, Artificial Sequence
  Description of Artificial Sequence: Synthetic peptide
  MOD_RES (3)..(3): Any amino acid
LPXTG

SEQ ID NO: 3 - protein, 4 aa, Artificial Sequence
  Description of Artificial Sequence: Synthetic peptide
GSAS

SEQ ID NO: 4 - protein, 8 aa, Artificial Sequence
  Description of Artificial Sequence: Synthetic 8xHis tag
HHHHHHHH

SEQ ID NO: 5 - protein, 6 aa, Artificial Sequence
  Description of Artificial Sequence: Synthetic 6xHis tag
HHHHHH

SEQ ID NO: 6 - protein, 1208 aa, Severe acute respiratory syndrome coronavirus 2
MFVFLVLLPLVSSQCVNLTTRTQLPPAYTNSFTRGVYYPDKVFRSSVLHSTQDLFLPFFSNVTWFHAIHVSGTNGTKRFDNPVLPFNDGVYFASTEKSNIIRGWIFGTTLDSKTQSLLIVNNATNVVIKVCEFQFCNDPFLGVYYHKNNKSWMESEFRVYSSANNCTFEYVSQPFLMDLEGKQGNFKNLREFVFKNIDGYFKIYSKHTPINLVRDLPQGFSALEPLVDLPIGINITRFQTLLALHRSYLTPGDSSSGWTAGAAAYYVGYLQPRTFLLKYNENGTITDAVDCALDPLSETKCTLKSFTVEKGIYQTSNFRVQPTESIVRFPNITNLCPFGEVFNATRFASVYAWNRKRISNCVADYSVLYNSASFSTFKCYGVSPTKLNDLCFTNVYADSFVIRGDEVRQIAPGQTGKIADYNYKLPDDFTGCVIAWNSNNLDSKVGGNYNYLYRLFRKSNLKPFERDISTEIYQAGSTPCNGVEGFNCYFPLQSYGFQPTNGVGYQPYRVVVLSFELLHAPATVCGPKKSTNLVKNKCVNFNFNGLTGTGVLTESNKKFLPFQQFGRDIADTTDAVRDPQTLEILDITPCSFGGVSVITPGTNTSNQVAVLYQDVNCTEVPVAIHADQLTPTWRVYSTGSNVFQTRAGCLIGAEHVNNSYECDIPIGAGICASYQTQTNSPGSASSVASQSIIAYTMSLGAENSVAYSNNSIAIPTNFTISVTTEILPVSMTKTSVDCTMYICGDSTECSNLLLQYGSFCTQLNRALTGIAVEQDKNTQEVFAQVKQIYKTPPIKDFGGFNFSQILPDPSKPSKRSFIEDLLFNKVTLADAGFIKQYGDCLGDIAARDLICAQKFNGLTVLPPLLTDEMIAQYTSALLAGTITSGWTFGAGAALQIPFAMQMAYRFNGIGVTQNVLYENQKLIANQFNSAIGKIQDSLSSTASALGKLQDVVNQNAQALNTLVKQLSSNFGAISSVLNDILSRLDPPEAEVQIDRLITGRLQSLQTYVTQQLIRAAEIRASANLAATKMSECVLGQSKRVDFCGKGYHLMSFPQSAPHGVVFLHVTYVPAQEKNFTTAPAICHDGKAHFPREGVFVSNGTHWFVTQRNFYEPQIITTDNTFVSGNCDVVIGIVNNTVYDPLQPELDSFKEELDKYFKNHTSPDVDLGDISGINASVVNIQKEIDRLNEVAKNLNESLIDLQELGKYEQ

SEQ ID NO: 7 - protein, 1208 aa, Artificial Sequence
  Description of Artificial Sequence: Synthetic polypeptide
MFVFLVLLPLVSSQCVNLTTRTQLPPAYTNSFTRGVYYPDKVFRSSVLHSTQDLFLPFFSNVTWFHAIHVSGTNGTKRFDNPVLPFNDGVYFASTEKSNIIRGWIFGTTLDSKTISLLIVNNATNVVIKVCEFQFCNDPFLGVYYHKNNKSWMESEFRVYSSANNCTFEYVSQPFLMDLEGKQGNFKNLREFVFKNIDGYFKIYSKHTPINLVRDLPQGFSALEPLVDLPIGINITRFQTLLALHRSYLTPGDSSSGWTAGAAAYYVGYLQPRTFLLKYNENGTITDAVDCALDPLSETKCTLKSFTVEKGIYQTSNFRVQPTESIVRFPNITNLCPFGEVFNATRFASVYAWNRKRISNCVADYSVLYNSASFSTFKCYGVSPTKLNDLCFTNVYADSFVIRGDEVRQIAPGQTGKIADYNYKLPDDFTGCVIAWNSNNLDSKVGGNYNYLYRLFRKSNLKPFERMISTEIYQAGSTPCNGVEGFNCYFPLQSYGFQPTNGVGYQPYRVVVLSFELLHAPATVCGPKKSTNLVKNKCVNFNFNGLTGTGVLTESNKKFLPFQQFGRDIADTTDAVRDPQTLEILDITPCSFGGVSVITPGTNTSNQVAVLYQDVNCTEVPVAIHADQLTPTWRVYSTGSNVFQTRAGCLIGAEHVNNSYECDIPIGAGICASYQTQTNSPGSASSVASQSIIAYTMSLGAENSVAYSNNSIAIPTNFTISVTTEILPVSMTKTSVDCTMYICGDSTECSNLLLQYGSFCTQLNRALTGIAVEQDKNTQEVFAQVKQIYKTPPIKDFGGFNFSQILPDPSKPSKRSFIEDLLFNKVTLADAGFIKQYGDCLGDIAARDLICAQKFNGLTVLPPLLTDEMIAQYTSALLAGTITSGWTFGAGAALQIPFAMQMAYRFNGIGVTQNVLYENQKLIANQFNSAIGKIQDSLSSTASALGKLQDVVNQNAQALNTLVKQLSSNFGAISSVLNDILSRLDPPEAEVQIDRLITGRLQSLQTYVTQQLIRAAEIRASANLAATKMSECVLGQSKRVDFCGKGYHLMSFPQSAPHGVVFLHVTYVPAQEKNFTTAPAICHDGKAHFPREGVFVSNGTHWFVTQRNFYEPQIITTDNTFVSGNCDVVIGIVNNTVYDPLQPELDSFKEELDKYFKNHTSPDVDLGDISGINASVVNIQKEIDRLNEVAKNLNESLIDLQELGKYEQ

SEQ ID NO: 8 - protein, 1208 aa, Artificial Sequence
  Description of Artificial Sequence: Synthetic polypeptide
MFVFLVLLPLVSSQCVNLTTRTQLPPAYTNSFTRGVYYPDKVFRSSVLHSTQDLFLPFFSNVTWFHAIHVSGTNGTKRFDNPVLPFNDGVYFASTEKSNIIRGWIFGTTLDSKTISLLIVNNATNVVIKVCEFQFCNDPFLGVYYHKNNKSWMESEFRVYSSANNCTFEYVSQPFLMDLEGKQGNFKNLREFVFKNIDGYFKIYSKHTPINLVRDLPQGFSALEPLVDLPIGINITRFQTLLALHRSYLTPGDSSSGWTAGAAAYYVGYLQPRTFLLKYNENGTITDAVDCALDPLSETKCTLKSFTVEKGIYQTSNFRVQPTESIVRFPNITNLCPFGEVFNATRFASVYAWNRKRISNCVADYSVLYNSASFSTFKCYGVSPTKLNDLCFTNVYADSFVIRGDEVRQIAPGQTGKIADYNYKLPDDFTGCVIAWNSNNLDSKVGGNYNYLYRLFRKSNLKPFERIISTEIYQAGSTPCNGVEGFNCYFPLQSYGFQPTNGVGYQPYRVVVLSFELLHAPATVCGPKKSTNLVKNKCVNFNFNGLTGTGVLTESNKKFLPFQQFGRDIADTTDAVRDPQTLEILDITPCSFGGVSVITPGTNTSNQVAVLYQDVNCTEVPVAIHADQLTPTWRVYSTGSNVFQTRAGCLIGAEHVNNSYECDIPIGAGICASYQTQTNSPGSASSVASQSIIAYTMSLGAENSVAYSNNSIAIPTNFTISVTTEILPVSMTKTSVDCTMYICGDSTECSNLLLQYGSFCTQLNRALTGIAVEQDKNTQEVFAQVKQIYKTPPIKDFGGFNFSQILPDPSKPSKRSFIEDLLFNKVTLADAGFIKQYGDCLGDIAARDLICAQKFNGLTVLPPLLTDEMIAQYTSALLAGTITSGWTFGAGAALQIPFAMQMAYRFNGIGVTQNVLYENQKLIANQFNSAIGKIQDSLSSTASALGKLQDVVNQNAQALNTLVKQLSSNFGAISSVLNDILSRLDPPEAEVQIDRLITGRLQSLQTYVTQQLIRAAEIRASANLAATKMSECVLGQSKRVDFCGKGYHLMSFPQSAPHGVVFLHVTYVPAQEKNFTTAPAICHDGKAHFPREGVFVSNGTHWFVTQRNFYEPQIITTDNTFVSGNCDVVIGIVNNTVYDPLQPELDSFKEELDKYFKNHTSPDVDLGDISGINASVVNIQKEIDRLNEVAKNLNESLIDLQELGKYEQ

SEQ ID NO: 9 - protein, 1208 aa, Artificial Sequence
  Description of Artificial Sequence: Synthetic polypeptide
MFVFLVLLPLVSSQCVNLTTRTQLPPAYTNSFTRGVYYPDKVFRSSVLHSTQDLFLPFFSNVTWFHAIHVSGTNGTKRFDNPVLPFNDGVYFASTEKSNIIRGWIFGTTLDSKTISLLIVNNATNVVIKVCEFQFCNDPFLGVYYHKNNKSWMESEFRVYSSANNCTFEYVSQPFLMDLEGKQGNFKNLREFVFKNIDGYFKIYSKHTPINLVRDLPQGFSALEPLVDLPIGINITRFQTLLALHRSYLTPGDSSSGWTAGAAAYYVGYLQPRTFLLKYNENGTITDAVDCALDPLSETKCTLKSFTVEKGIYQTSNFRVQPTESIVRFPNITNLCPFGEVFNATRFASVYAWNRKRISNCVADYSVLYNSASFSTFKCYGVSPTKLNDLCFTNVYADSFVIRGDEVRQIAPGQTGKIADYNYKLPDDFTGCVIAWNSNNLDSKVGGNYNYLYRLFRKSNLKPFERMLSTEIYQAGSTPCNGVEGFNCYFPLQSYGFQPTNGVGYQPYRVVVLSFELLHAPATVCGPKKSTNLVKNKCVNFNFNGLTGTGVLTESNKKFLPFQQFGRDIADTTDAVRDPQTLEILDITPCSFGGVSVITPGTNTSNQVAVLYQDVNCTEVPVAIHADQLTPTWRVYSTGSNVFQTRAGCLIGAEHVNNSYECDIPIGAGICASYQTQTNSPGSASSVASQSIIAYTMSLGAENSVAYSNNSIAIPTNFTISVTTEILPVSMTKTSVDCTMYICGDSTECSNLLLQYGSFCTQLNRALTGIAVEQDKNTQEVFAQVKQIYKTPPIKDFGGFNFSQILPDPSKPSKRSFIEDLLFNKVTLADAGFIKQYGDCLGDIAARDLICAQKFNGLTVLPPLLTDEMIAQYTSALLAGTITSGWTFGAGAALQIPFAMQMAYRFNGIGVTQNVLYENQKLIANQFNSAIGKIQDSLSSTASALGKLQDVVNQNAQALNTLVKQLSSNFGAISSVLNDILSRLDPPEAEVQIDRLITGRLQSLQTYVTQQLIRAAEIRASANLAATKMSECVLGQSKRVDFCGKGYHLMSFPQSAPHGVVFLHVTYVPAQEKNFTTAPAICHDGKAHFPREGVFVSNGTHWFVTQRNFYEPQIITTDNTFVSGNCDVVIGIVNNTVYDPLQPELDSFKEELDKYFKNHTSPDVDLGDISGINASVVNIQKEIDRLNEVAKNLNESLIDLQELGKYEQ

SEQ ID NO: 10 - protein, 1208 aa, Artificial Sequence
  Description of Artificial Sequence: Synthetic polypeptide
MFVFLVLLPLVSSQCVNLTTRTQLPPAYTNSFTRGVYYPDKVFRSSVLHSTQDLFLPFFSNVTWFHAIHVSGTNGTKRFDNPVLPFNDGVYFASTEKSNIIRGWIFGTTLDSKTISLLIVNNATNVVIKVCEFQFCNDPFLGVYYHKNNKSWMESEFRVYSSANNCTFEYVSQPFLMDLEGKQGNFKNLREFVFKNIDGYFKIYSKHTPINLVRDLPQGFSALEPLVDLPIGINITRFQTLLALHRSYLTPGDSSSGWTAGAAAYYVGYLQPRTFLLKYNENGTITDAVDCALDPLSETKCTLKSFTVEKGIYQTSNFRVQPTESIVRFPNITNLCPFGEVFNATRFASVYAWNRKRISNCVADYSVLYNSASFSTFKCYGVSPTKLNDLCFTNVYADSFVIRGDEVRQIAPGQTGKIADYNYKLPDDFTGCVIAWNSNNLDSKVGGNYNYLYRLFRKSNLKPFERILSTEIYQAGSTPCNGVEGFNCYFPLQSYGFQPTNGVGYQPYRVVVLSFELLHAPATVCGPKKSTNLVKNKCVNFNFNGLTGTGVLTESNKKFLPFQQFGRDIADTTDAVRDPQTLEILDITPCSFGGVSVITPGTNTSNQVAVLYQDVNCTEVPVAIHADQLTPTWRVYSTGSNVFQTRAGCLIGAEHVNNSYECDIPIGAGICASYQTQTNSPGSASSVASQSIIAYTMSLGAENSVAYSNNSIAIPTNFTISVTTEILPVSMTKTSVDCTMYICGDSTECSNLLLQYGSFCTQLNRALTGIAVEQDKNTQEVFAQVKQIYKTPPIKDFGGFNFSQILPDPSKPSKRSFIEDLLFNKVTLADAGFIKQYGDCLGDIAARDLICAQKFNGLTVLPPLLTDEMIAQYTSALLAGTITSGWTFGAGAALQIPFAMQMAYRFNGIGVTQNVLYENQKLIANQFNSAIGKIQDSLSSTASALGKLQDVVNQNAQALNTLVKQLSSNFGAISSVLNDILSRLDPPEAEVQIDRLITGRLQSLQTYVTQQLIRAAEIRASANLAATKMSECVLGQSKRVDFCGKGYHLMSFPQSAPHGVVFLHVTYVPAQEKNFTTAPAICHDGKAHFPREGVFVSNGTHWFVTQRNFYEPQIITTDNTFVSGNCDVVIGIVNNTVYDPLQPELDSFKEELDKYFKNHTSPDVDLGDISGINASVVNIQKEIDRLNEVAKNLNESLIDLQELGKYEQ

SEQ ID NO: 11 - protein, 1208 aa, Artificial Sequence
  Description of Artificial Sequence: Synthetic polypeptide
MFVFLVLLPLVSSQCVNLTTRTQLPPAYTNSFTRGVYYPDKVFRSSVLHSTQDLFLPFFSNVTWFHAIHVSGTNGTKRFDNPVLPFNDGVYFASTEKSNIIRGWIFGTTLDSKTLSLLIVNNATNVVIKVCEFQFCNDPFLGVYYHKNNKSWMESEFRVYSSANNCTFEYVSQPFLMDLEGKQGNFKNLREFVFKNIDGYFKIYSKHTPINLVRDLPQGFSALEPLVDLPIGINITRFQTLLALHRSYLTPGDSSSGWTAGAAAYYVGYLQPRTFLLKYNENGTITDAVDCALDPLSETKCTLKSFTVEKGIYQTSNFRVQPTESIVRFPNITNLCPFGEVFNATRFASVYAWNRKRISNCVADYSVLYNSASFSTFKCYGVSPTKLNDLCFTNVYADSFVIRGDEVRQIAPGQTGKIADYNYKLPDDFTGCVIAWNSNNLDSKVGGNYNYLYRLFRKSNLKPFERIISTEIYQAGSTPCNGVEGFNCYFPLQSYGFQPTNGVGYQPYRVVVLSFELLHAPATVCGPKKSTNLVKNKCVNFNFNGLTGTGVLTESNKKFLPFQQFGRDIADTTDAVRDPQTLEILDITPCSFGGVSVITPGTNTSNQVAVLYQDVNCTEVPVAIHADQLTPTWRVYSTGSNVFQTRAGCLIGAEHVNNSYECDIPIGAGICASYQTQTNSPGSASSVASQSIIAYTMSLGAENSVAYSNNSIAIPTNFTISVTTEILPVSMTKTSVDCTMYICGDSTECSNLLLQYGSFCTQLNRALTGIAVEQDKNTQEVFAQVKQIYKTPPIKDFGGFNFSQILPDPSKPSKRSFIEDLLFNKVTLADAGFIKQYGDCLGDIAARDLICAQKFNGLTVLPPLLTDEMIAQYTSALLAGTITSGWTFGAGAALQIPFAMQMAYRFNGIGVTQNVLYENQKLIANQFNSAIGKIQDSLSSTASALGKLQDVVNQNAQALNTLVKQLSSNFGAISSVLNDILSRLDPPEAEVQIDRLITGRLQSLQTYVTQQLIRAAEIRASANLAATKMSECVLGQSKRVDFCGKGYHLMSFPQSAPHGVVFLHVTYVPAQEKNFTTAPAICHDGKAHFPREGVFVSNGTHWFVTQRNFYEPQIITTDNTFVSGNCDVVIGIVNNTVYDPLQPELDSFKEELDKYFKNHTSPDVDLGDISGINASVVNIQKEIDRLNEVAKNLNESLIDLQELGKYEQ

SEQ ID NO: 12 - protein, 1208 aa, Artificial Sequence
  Description of Artificial Sequence: Synthetic polypeptide
MFVFLVLLPLVSSQCVNLTTRTQLPPAYTNSFTRGVYYPDKVFRSSVLHSTQDLFLPFFSNVTWFHAIHVSGTNGTKRFDNPVLPFNDGVYFASTEKSNIIRGWIFGTTLDSKTQSLLIVNNATNVVIKVCEFQFCNDPFLGVYYHKNNKSWMESEFRVYSSANNCTFEYVSQPFLMDLEGKQGNFKNLREFVFKNICGYFKIYSKHTPINLVRDLPQGFSALEPLVDLPIGINITRFQTLLALHRSYLTPGDSSSGWTAGAAAYYVGYLQPRTFLLKYNENGTITDAVDCALDPLSETKCTLKSFTVEKGIYQTSNFRVQPTESIVRFPNITNLCPFGEVFNATRFASVYAWNRKRISNCVADYSVLYNSASFSTFKCYGVSPTKLNDLCFTNVYADSFVIRGDEVRQIAPGQTGKIADYNYKLPDDFTGCVIAWNSNNLDSKVGGNYNYLYRLFRKSNLKPCERDISTEIYQAGSTPCNGVEGFNCYFPLQSYGFQPTNGVGYQPYRVVVLSFELLHAPATVCGPKKSTNLVKNKCVNFNFNGLTGTGVLTESNKKFLPFQQFGRDIADTTDAVRDPQTLEILDITPCSFGGVSVITPGTNTSNQVAVLYQDVNCTEVPVAIHADQLTPTWRVYSTGSNVFQTRAGCLIGAEHVNNSYECDIPIGAGICASYQTQTNSPGSASSVASQSIIAYTMSLGAENSVAYSNNSIAIPTNFTISVTTEILPVSMTKTSVDCTMYICGDSTECSNLLLQYGSFCTQLNRALTGIAVEQDKNTQEVFAQVKQIYKTPPIKDFGGFNFSQILPDPSKPSKRSFIEDLLFNKVTLADAGFIKQYGDCLGDIAARDLICAQKFNGLTVLPPLLTDEMIAQYTSALLAGTITSGWTFGAGAALQIPFAMQMAYRFNGIGVTQNVLYENQKLIANQFNSAIGKIQDSLSSTASALGKLQDVVNQNAQALNTLVKQLSSNFGAISSVLNDILSRLDPPEAEVQIDRLITGRLQSLQTYVTQQLIRAAEIRASANLAATKMSECVLGQSKRVDFCGKGYHLMSFPQSAPHGVVFLHVTYVPAQEKNFTTAPAICHDGKAHFPREGVFVSNGTHWFVTQRNFYEPQIITTDNTFVSGNCDVVIGIVNNTVYDPLQPELDSFKEELDKYFKNHTSPDVDLGDISGINASVVNIQKEIDRLNEVAKNLNESLIDLQELGKYEQ

SEQ ID NO: 13 - protein, 1208 aa, Artificial Sequence
  Description of Artificial Sequence: Synthetic polypeptide
MFVFLVLLPLVSSQCVNLTTRTQLPPAYTNSFTRGVYYPDKVFRSSVLHSTQDLFLPFFSNVTWFHAIHVSGTNGTKRFDNPVLPFNDGVYFASTEKSNIIRGWIFGTTLDSKTQSLLIVNNATNVVIKVCEFQFCNDPFLGVYYHKNNKSWMESEFRVYSSANNCTFEYVSQPFLMDLEGKQGNFKNLREFVFKNIDCYFKIYSKHTPINLVRDLPQGFSALEPLVDLPIGINITRFQTLLALHRSYLTPGDSSSGWTAGAAAYYVGYLQPRTFLLKYNENGTITDAVDCALDPLSETKCTLKSFTVEKGIYQTSNFRVQPTESIVRFPNITNLCPFGEVFNATRFASVYAWNRKRISNCVADYSVLYNSASFSTFKCYGVSPTKLNDLCFTNVYADSFVIRGDEVRQIAPGQTGKIADYNYKLPDDFTGCVIAWNSNNLDSKVGGNYNYLYRLFRKSNLKPCERDISTEIYQAGSTPCNGVEGFNCYFPLQSYGFQPTNGVGYQPYRVVVLSFELLHAPATVCGPKKSTNLVKNKCVNFNFNGLTGTGVLTESNKKFLPFQQFGRDIADTTDAVRDPQTLEILDITPCSFGGVSVITPGTNTSNQVAVLYQDVNCTEVPVAIHADQLTPTWRVYSTGSNVFQTRAGCLIGAEHVNNSYECDIPIGAGICASYQTQTNSPGSASSVASQSIIAYTMSLGAENSVAYSNNSIAIPTNFTISVTTEILPVSMTKTSVDCTMYICGDSTECSNLLLQYGSFCTQLNRALTGIAVEQDKNTQEVFAQVKQIYKTPPIKDFGGFNFSQILPDPSKPSKRSFIEDLLFNKVTLADAGFIKQYGDCLGDIAARDLICAQKFNGLTVLPPLLTDEMIAQYTSALLAGTITSGWTFGAGAALQIPFAMQMAYRFNGIGVTQNVLYENQKLIANQFNSAIGKIQDSLSSTASALGKLQDVVNQNAQALNTLVKQLSSNFGAISSVLNDILSRLDPPEAEVQIDRLITGRLQSLQTYVTQQLIRAAEIRASANLAATKMSECVLGQSKRVDFCGKGYHLMSFPQSAPHGVVFLHVTYVPAQEKNFTTAPAICHDGKAHFPREGVFVSNGTHWFVTQRNFYEPQIITTDNTFVSGNCDVVIGIVNNTVYDPLQPELDSFKEELDKYFKNHTSPDVDLGDISGINASVVNIQKEIDRLNEVAKNLNESLIDLQELGKYEQ

SEQ ID NO: 14 - protein, 1208 aa, Artificial Sequence
  Description of Artificial Sequence: Synthetic polypeptide
MFVFLVLLPLVSSQCVNLTTRTQLPPAYTNSFTRGVYYPDKVFRSSVLHSTQDLFLPFFSNVTWFHAIHVSGTNGTKRFDNPVLPFNDGVYFASTEKSNIIRGWIFGTTLDSKTQSLLIVNNATNVVIKVCEFQFCNDPFLGVYYHKNNKSWMESEFRVYSSANNCTFEYVSQPFLMDLEGKQGNFKNLREFVFKNIDGYFKIYSKHTPINLVRDLPQGFSALEPLVDLPIGINITRFQTLLALHRSYLTPGDSSSGWTAGAAAYYVGYLQPRTFLLKYNENGTITDAVDCALDPLSETKCTLKSFTVEKGIYQTSNFRVQPTESIVRFPNITNLCPFGEVFNATRFASVYAWNRKRISNCVADYSVLYNSASFSTFKCYGVSPTKLNDLCFTNVYADSFVIRGDEVRQIAPGQTGKIADYMYKLPDDFTGCVIAWNSNNLDSKVGGNYNYLYRLFRKSNMKPFERDISTEIYQAGSTPCNGVEGFNCYFPLQSYGFQPTNGVGYQPYRVVVLMFELLHAPATVCGPKKSTNLVKNKCVNFNFNGLTGTGVLTESNKKFLPFQQFGRDIADTTDAVRDPQTLEILDITPCSFGGVSVITPGTNTSNQVAVLYQDVNCTEVPVAIHADQLTPTWRVYSTGSNVFQTRAGCLIGAEHVNNSYECDIPIGAGICASYQTQTNSPGSASSVASQSIIAYTMSLGAENSVAYSNNSIAIPTNFTISVTTEILPVSMTKTSVDCTMYICGDSTECSNLLLQYGSFCTQLNRALTGIAVEQDKNTQEVFAQVKQIYKTPPIKDFGGFNFSQILPDPSKPSKRSFIEDLLFNKVTLADAGFIKQYGDCLGDIAARDLICAQKFNGLTVLPPLLTDEMIAQYTSALLAGTITSGWTFGAGAALQIPFAMQMAYRFNGIGVTQNVLYENQKLIANQFNSAIGKIQDSLSSTASALGKLQDVVNQNAQALNTLVKQLSSNFGAISSVLNDILSRLDPPEAEVQIDRLITGRLQSLQTYVTQQLIRAAEIRASANLAATKMSECVLGQSKRVDFCGKGYHLMSFPQSAPHGVVFLHVTYVPAQEKNFTTAPAICHDGKAHFPREGVFVSNGTHWFVTQRNFYEPQIITTDNTFVSGNCDVVIGIVNNTVYDPLQPELDSFKEELDKYFKNHTSPDVDLGDISGINASVVNIQKEIDRLNEVAKNLNESLIDLQELGKYEQ

SEQ ID NO: 15 - protein, 1208 aa, Artificial Sequence
  Description of Artificial Sequence: Synthetic polypeptide
MFVFLVLLPLVSSQCVNLTTRTQLPPAYTNSFTRGVYYPDKVFRSSVLHSTQDLFLPFFSNVTWFHAIHVSGTNGTKRFDNPVLPFNDGVYFASTEKSNIIRGWIFGTTLDSKTQSLLIVNNATNVVIKVCEFQFCNDPFLGVYYHKNNKSWMESEFRVYSSANNCTFEYVSQPFLMDLEGKQGNFKNLREFVFKNIDGYFKIYSKHTPINLVRDLPQGFSALEPLVDLPIGINITRFQTLLALHRSYLTPGDSSSGWTAGAAAYYVGYLQPRTFLLKYNENGTITDAVDCALDPLSETKCTLKSFTVEKGIYQTSNFRVQPTESIVRFPNITNLCPFGEVFNATRFASVYAWNRKRISNCVADYSVLYNSASFSTFKCYGVSPTKLNDLCFTNVYADSFVIRGDEVRQIAPGQTGKIADYMYKLPDDFTGCVIAWNSNNLDSKVGGNYNYLYRLFRKSNLKPFERDISTEIYQAGSTPCNGVEGFNCYFPLQSYGFQPTNGVGYQPYRVVVLMFELLHAPATVCGPKKSTNLVKNKCVNFNFNGLTGTGVLTESNKKFLPFQQFGRDIADTTDAVRDPQTLEILDITPCSFGGVSVITPGTNTSNQVAVLYQDVNCTEVPVAIHADQLTPTWRVYSTGSNVFQTRAGCLIGAEHVNNSYECDIPIGAGICASYQTQTNSPGSASSVASQSIIAYTMSLGAENSVAYSNNSIAIPTNFTISVTTEILPVSMTKTSVDCTMYICGDSTECSNLLLQYGSFCTQLNRALTGIAVEQDKNTQEVFAQVKQIYKTPPIKDFGGFNFSQILPDPSKPSKRSFIEDLLFNKVTLADAGFIKQYGDCLGDIAARDLICAQKFNGLTVLPPLLTDEMIAQYTSALLAGTITSGWTFGAGAALQIPFAMQMAYRFNGIGVTQNVLYENQKLIANQFNSAIGKIQDSLSSTASALGKLQDVVNQNAQALNTLVKQLSSNFGAISSVLNDILSRLDPPEAEVQIDRLITGRLQSLQTYVTQQLIRAAEIRASANLAATKMSECVLGQSKRVDFCGKGYHLMSFPQSAPHGVVFLHVTYVPAQEKNFTTAPAICHDGKAHFPREGVFVSNGTHWFVTQRNFYEPQIITTDNTFVSGNCDVVIGIVNNTVYDPLQPELDSFKEELDKYFKNHTSPDVDLGDISGINASVVNIQKEIDRLNEVAKNLNESLIDLQELGKYEQ

SEQ ID NO: 16 - protein, 1208 aa, Artificial Sequence
  Description of Artificial Sequence: Synthetic polypeptide
MFVFLVLLPLVSSQCVNLTTRTQLPPAYTNSFTRGVYYPDKVFRSSVLHSTQDLFLPFFSNVTWFHAIHVSGTNGTKRFDNPVLPFNDGVYFASTEKSNIIRGWIFGTTLDSKTQSLLIVNNATNVVIKVCEFQFCNDPFLGVYYHKNNKSWMESEFRVYSSANNCTFEYVSQPFLMDLEGKQGNFKNLREFVFKNIDGYFKIYSKHTPINLVRDLPQGFSALEPLVDLPIGINITRFQTLLALHRSYLTPGDSSSGWTAGAAAYYVGYLQPRTFLLKYNENGTITDAVDCALDPLSETKCTLKSFTVEKGIYQTSNFRVQPTESIVRFPNITNLCPFGEVFNATRFASVYAWNRKRISNCVADYSVLYNSASFSTFKCYGVSPTKLNDLCFTNVYADSFVIRGDEVRQIAPGQTGKIADYMYKLPDDFTGCVIAWNSNNLDSKVGGNYNYLYRLFRKSNMKPFERDISTEIYQAGSTPCNGVEGFNCYFPLQSYGFQPTNGVGYQPYRVVVLIFELLHAPATVCGPKKSTNLVKNKCVNFNFNGLTGTGVLTESNKKFLPFQQFGRDIADTTDAVRDPQTLEILDITPCSFGGVSVITPGTNTSNQVAVLYQDVNCTEVPVAIHADQLTPTWRVYSTGSNVFQTRAGCLIGAEHVNNSYECDIPIGAGICASYQTQTNSPGSASSVASQSIIAYTMSLGAENSVAYSNNSIAIPTNFTISVTTEILPVSMTKTSVDCTMYICGDSTECSNLLLQYGSFCTQLNRALTGIAVEQDKNTQEVFAQVKQIYKTPPIKDFGGFNFSQILPDPSKPSKRSFIEDLLFNKVTLADAGFIKQYGDCLGDIAARDLICAQKFNGLTVLPPLLTDEMIAQYTSALLAGTITSGWTFGAGAALQIPFAMQMAYRFNGIGVTQNVLYENQKLIANQFNSAIGKIQDSLSSTASALGKLQDVVNQNAQALNTLVKQLSSNFGAISSVLNDILSRLDPPEAEVQIDRLITGRLQSLQTYVTQQLIRAAEIRASANLAATKMSECVLGQSKRVDFCGKGYHLMSFPQSAPHGVVFLHVTYVPAQEKNFTTAPAICHDGKAHFPREGVFVSNGTHWFVTQRNFYEPQIITTDNTFVSGNCDVVIGIVNNTVYDPLQPELDSFKEELDKYFKNHTSPDVDLGDISGINASVVNIQKEIDRLNEVAKNLNESLIDLQELGKYEQ

SEQ ID NO: 17 - protein, 1208 aa, Artificial Sequence
  Description of Artificial Sequence: Synthetic polypeptide
MFVFLVLLPLVSSQCVNLTTRTQLPPAYTNSFTRGVYYPDKVFRSSVLHSTQDLFLPFFSNVTWFHAIHVSGTNGTKRFDNPVLPFNDGVYFASTEKSNIIRGWIFGTTLDSKTQSLLIVNNATNVVIKVCEFQFCNDPFLGVYYHKNNKSWMESEFRVYSSANNCTFEYVSQPFLMDLEGKQGNFKNLREFVFKNIDGYFKIYSKHTPINLVRDLPQGFSALEPLVDLPIGINITRFQTLLALHRSYLTPGDSSSGWTAGAAAYYVGYLQPRTFLLKYNENGTITDAVDCALDPLSETKCTLKSFTVEKGIYQTSNFRVQPTESIVRFPNITNLCPFGEVFNATRFASVYAWNRKRISNCVADYSVLYNSASFSTFKCYGVSPTKLNDLCFTNVYADSFVIRGDEVRQIAPGQTGKIADYNYKLPDDFTGCVIAWNSNNLDSKVGGNYNYLYRLFRKSNMKPFERDISTEIYQAGSTPCNGVEGFNCYFPLQSYGFQPTNGVGYQPYRVVVLMFELLHAPATVCGPKKSTNLVKNKCVNFNFNGLTGTGVLTESNKKFLPFQQFGRDIADTTDAVRDPQTLEILDITPCSFGGVSVITPGTNTSNQVAVLYQDVNCTEVPVAIHADQLTPTWRVYSTGSNVFQTRAGCLIGAEHVNNSYECDIPIGAGICASYQTQTNSPGSASSVASQSIIAYTMSLGAENSVAYSNNSIAIPTNFTISVTTEILPVSMTKTSVDCTMYICGDSTECSNLLLQYGSFCTQLNRALTGIAVEQDKNTQEVFAQVKQIYKTPPIKDFGGFNFSQILPDPSKPSKRSFIEDLLFNKVTLADAGFIKQYGDCLGDIAARDLICAQKFNGLTVLPPLLTDEMIAQYTSALLAGTITSGWTFGAGAALQIPFAMQMAYRFNGIGVTQNVLYENQKLIANQFNSAIGKIQDSLSSTASALGKLQDVVNQNAQALNTLVKQLSSNFGAISSVLNDILSRLDPPEAEVQIDRLITGRLQSLQTYVTQQLIRAAEIRASANLAATKMSECVLGQSKRVDFCGKGYHLMSFPQSAPHGVVFLHVTYVPAQEKNFTTAPAICHDGKAHFPREGVFVSNGTHWFVTQRNFYEPQIITTDNTFVSGNCDVVIGIVNNTVYDPLQPELDSFKEELDKYFKNHTSPDVDLGDISGINASVVNIQKEIDRLNEVAKNLNESLIDLQELGKYEQ

SEQ ID NO: 18 - protein, 1208 aa, Artificial Sequence
  Description of Artificial Sequence: Synthetic polypeptide
MFVFLVLLPLVSSQCVNLTTRTQLPPAYTNSFTRGVYYPDKVFRSSVLHSTQDLFLPFFSNVTWFHAIHVSGTNGTKRFDNPVLPFNDGVYFASTEKSNIIRGWIFGTTLDSKTQSLLIVNNATNVVIKVCEFQFCNDPFLGVYYHKNNKSWMESEFRVYSSANNCTFEYVSQPFLMDLEGKQGNFKNLREFVFKNIDGYFKIYSKHTPINLVRDLPQGFSALEPLVDLPIGINITRFQTLLALHRSYLTPGDSSSGWTAGAAAYYVGYLQPRTFLLKYNENGTITDAVDCALDPLSETKCTLKSFTVEKGIYQTSNFRVQPTESIVRFPNITNLCPFGEVFNATRFASVYAWNRKRISNCVADYSVLYNSASFSTFKCYGVSPTKLNDLCFTNVYADSFVIRGDEVRQIAPGQTGKIADYMYKLPDDFTGCVIAWNSNNLDSKVGGNYNYLYRLFRKSNMKPFERDISTEIYQAGSTPCNGVEGFNCYFPLQSYGFQPTNGVGYQPYRVVVLDFELLHAPATVCGPKKSTNLVKNKCVNFNFNGLTGTGVLTESNKKFLPFQQFGRDIADTTDAVRDPQTLEILDITPCSFGGVSVITPGTNTSNQVAVLYQDVNCTEVPVAIHADQLTPTWRVYSTGSNVFQTRAGCLIGAEHVNNSYECDIPIGAGICASYQTQTNSPGSASSVASQSIIAYTMSLGAENSVAYSNNSIAIPTNFTISVTTEILPVSMTKTSVDCTMYICGDSTECSNLLLQYGSFCTQLNRALTGIAVEQDKNTQEVFAQVKQIYKTPPIKDFGGFNFSQILPDPSKPSKRSFIEDLLFNKVTLADAGFIKQYGDCLGDIAARDLICAQKFNGLTVLPPLLTDEMIAQYTSALLAGTITSGWTFGAGAALQIPFAMQMAYRFNGIGVTQNVLYENQKLIANQFNSAIGKIQDSLSSTASALGKLQDVVNQNAQALNTLVKQLSSNFGAISSVLNDILSRLDPPEAEVQIDRLITGRLQSLQTYVTQQLIRAAEIRASANLAATKMSECVLGQSKRVDFCGKGYHLMSFPQSAPHGVVFLHVTYVPAQEKNFTTAPAICHDGKAHFPREGVFVSNGTHWFVTQRNFYEPQIITTDNTFVSGNCDVVIGIVNNTVYDPLQPELDSFKEELDKYFKNHTSPDVDLGDISGINASVVNIQKEIDRLNEVAKNLNESLIDLQELGKYEQ

SEQ ID NO: 19 - protein, 1208 aa, Artificial Sequence
  Description of Artificial Sequence: Synthetic polypeptide
MFVFLVLLPLVSSQCVNLTTRTQLPPAYTNSFTRGVYYPDKVFRSSVLHSTQDLFLPFFSNVTWFHAIHVSGTNGTKRFDNPVLPFNDGVYFASTEKSNIIRGWIFGTTLDSKTQSLLIVNNATNVVIKVCEFQFCNDPFLGVYYHKNNKSWMESEFRVYSSANNCTFEYVSQPFLMDLEGKQGNFKNLREFVFKNIDGYFKIYSKHTPINLVRDLPQGFSALEPLVDLPIGINITRFQTLLALHRSYLTPGDSSSGWTAGAAAYYVGYLQPRTFLLKYNENGTITDAVDCALDPLSETKCTLKSFTVEKGIYQTSNFRVQPTESIVRFPNITNLCPFGEVFNATRFASVYAWNRKRISNCVADYSVLYNSASFSTFKCYGVSPTKLNDLCFTNVYADSFVIRGDEVRQIAPGQTGKIADYMYKLPDDFTGCVIAWNSNNLDSKVGGNYNYLYRLFRKSNLKPFERDISTEIYQAGSTPCNGVEGFNCYFPLQSYGFQPTNGVGYQPYRVVVLSFELLHAPATVCGPKKSTNLVKNKCVNFNFNGLTGTGVLTESNKKFLPFQQFGRDIADTTDAVRDPQTLEILDITPCSFGGVSVITPGTNTSNQVAVLYQDVNCTEVPVAIHADQLTPTWRVYSTGSNVFQTRAGCLIGAEHVNNSYECDIPIGAGICASYQTQTNSPGSASSVASQSIIAYTMSLGAENSVAYSNNSIAIPTNFTISVTTEILPVSMTKTSVDCTMYICGDSTECSNLLLQYGSFCTQLNRALTGIAVEQDKNTQEVFAQVKQIYKTPPIKDFGGFNFSQILPDPSKPSKRSFIEDLLFNKVTLADAGFIKQYGDCLGDIAARDLICAQKFNGLTVLPPLLTDEMIAQYTSALLAGTITSGWTFGAGAALQIPFAMQMAYRFNGIGVTQNVLYENQKLIANQFNSAIGKIQDSLSSTASALGKLQDVVNQNAQALNTLVKQLSSNFGAISSVLNDILSRLDPPEAEVQIDRLITGRLQSLQTYVTQQLIRAAEIRASANLAATKMSECVLGQSKRVDFCGKGYHLMSFPQSAPHGVVFLHVTYVPAQEKNFTTAPAICHDGKAHFPREGVFVSNGTHWFVTQRNFYEPQIITTDNTFVSGNCDVVIGIVNNTVYDPLQPELDSFKEELDKYFKNHTSPDVDLGDISGINASVVNIQKEIDRLNEVAKNLNESLIDLQELGKYEQ

SEQ ID NO: 20 - protein, 1208 aa, Artificial Sequence
  Description of Artificial Sequence: Synthetic polypeptide
MFVFLVLLPLVSSQCVNLTTRTQLPPAYTNSFTRGVYYPDKVFRSSVLHSTQDLFLPFFSNVTWFHAIHVSGTNGTKRFDNPVLPFNDGVYFASTEKSNIIRGWIFGTTLDSKTQSLLIVNNATNVVIKVCEFQFCNDPFLGVYYHKNNKSWMESEFRVYSSANNCTFEYVSQPFLMDLEGKQGNFKNLREFVFKNIDGYFKIYSKHTPINLVRDLPQGFSALEPLVDLPIGINITRFQTLLALHRSYLTPGDSSSGWTAGAAAYYVGYLQPRTFLLKYNENGTITDAVDCALDPLSETKCTLKSFTVEKGIYQTSNFRVQPTESIVRFPNITNLCPFGEVFNATRFASVYAWNRKRISNCVADYSVLYNSASFSTFKCYGVSPTKLNDLCFTNVYADSFVIRGDEVRQIAPGQTGKIADYNYKLPDDFTGCVIAWNSNNLDSKVGGNYNYLYRLFRKSNLKPFERDISTEIYQAGSTPCNGVEGFNCYFPLQSYGFQPTNGVGYQPYRVVVLMFELLHAPATVCGPKKSTNLVKNKCVNFNFNGLTGTGVLTESNKKFLPFQQFGRDIADTTDAVRDPQTLEILDITPCSFGGVSVITPGTNTSNQVAVLYQDVNCTEVPVAIHADQLTPTWRVYSTGSNVFQTRAGCLIGAEHVNNSYECDIPIGAGICASYQTQTNSPGSASSVASQSIIAYTMSLGAENSVAYSNNSIAIPTNFTISVTTEILPVSMTKTSVDCTMYICGDSTECSNLLLQYGSFCTQLNRALTGIAVEQDKNTQEVFAQVKQIYKTPPIKDFGGFNFSQILPDPSKPSKRSFIEDLLFNKVTLADAGFIKQYGDCLGDIAARDLICAQKFNGLTVLPPLLTDEMIAQYTSALLAGTITSGWTFGAGAALQIPFAMQMAYRFNGIGVTQNVLYENQKLIANQFNSAIGKIQDSLSSTASALGKLQDVVNQNAQALNTLVKQLSSNFGAISSVLNDILSRLDPPEAEVQIDRLITGRLQSLQTYVTQQLIRAAEIRASANLAATKMSECVLGQSKRVDFCGKGYHLMSFPQSAPHGVVFLHVTYVPAQEKNFTTAPAICHDGKAHFPREGVFVSNGTHWFVTQRNFYEPQIITTDNTFVSGNCDVVIGIVNNTVYDPLQPELDSFKEELDKYFKNHTSPDVDLGDISGINASVVNIQKEIDRLNEVAKNLNESLIDLQELGKYEQ

SEQ ID NO: 21 - protein, 1208 aa, Artificial Sequence
  Description of Artificial Sequence: Synthetic polypeptide
MFVFLVLLPLVSSQCVNLTTRTQLPPAYTNSFTRGVYYPDKVFRSSVLHSTQDLFLPFFSNVTWFHAIHVSGTNGTKRFDNPVLPFNDGVYFASTEKSNIIRGWIFGTTLDSKTQSLLIVNNATNVVIKVCEFQFCNDPFLGVYYHKNNKSWMESEFRVYSSANNCTFEYVSQPFLMDLEGKQGNFKNLREFVFKNIDGYFKIYSKHTPINLVRDLPQGFSALEPLVDLPIGINITRFQTLLALHRSYLTPGDSSSGWTAGAAAYYVGYLQPRTFLLKYNENGTITDAVDCALDPLSETKCTLKSFTVEKGIYQTSNFRVQPTESIVRFPNITNLCPFGEVFNATRFASVYAWNRKRISNCVADYSVLYNSASFSTFKCYGVSPTKLNDLCFTNVYADSFVIRGDEVRQIAPGQTGKIADYNYKLPDDFTGCVIAWNSNNLDSKVGGNYNYLYRLFRKSNLKPFERDISTEIYQAGSTPCNGVEGFNCYFPLQSYGFQPTNGVGYQPYRVVVLSFELLHAPATVCGPKKSTNLVKNKCVNFNFNGLTGTGVLTESNKKFLPFQQFGRDILDITDAVRDPQTLEILDITPCSFGGVSVITPGTNTSNQVAVLYQDVNCTEVPVAIHADQLTPTWRVYSTGSNVFQTRAGCLIGAEHVNNSYECDIPIGAGICASYQTQTNSPGSASSVASQSIIAYTMSLGAENSVAYSNNSIAIPTNFTISVTTEILPVSMTKTSVDCTMYICGDSTECSNLLLQYGSFCTQLNRALTGIAVEQDKNTQEVFAQVKQIYKTPPIKDFGGFNFSQILPDPSKPSKRSFIEDLLFNKVTLADAGFIKQYGDCLGDIAARDLICAQKYIGLTVLPPLLTDEMIAQYTSALLAGTITSGWTFGAGAALQIPFAMQMAYRFNGIGVTQNVLYENQKLIANQFNSAIGKIQDSLSSTASALGKLQDVVNQNAQALNTLVKQLSSNFGAISSVLNDILSRLDPPEAEVQIDRLITGRLQSLQTYVTQQLIRAAEIRASANLAATKMSECVLGQSKRVDFCGKGYHLMSFPQSAPHGVVFLHVTYVPAQEKNFTTAPAICHDGKAHFPREGVFVSNGTHWFVTQRNFYEPQIITTDNTFVSGNCDVVIGIVNNTVYDPLQPELDSFKEELDKYFKNHTSPDVDLGDISGINASVVNIQKEIDRLNEVAKNLNESLIDLQELGKYEQ

SEQ ID NO: 22 - protein, 1208 aa, Artificial Sequence
  Description of Artificial Sequence: Synthetic polypeptide
MFVFLVLLPLVSSQCVNLTTRTQLPPAYTNSFTRGVYYPDKVFRSSVLHSTQDLFLPFFSNVTWFHAIHVSGTNGTKRFDNPVLPFNDGVYFASTEKSNIIRGWIFGTTLDSKTQSLLIVNNATNVVIKVCEFQFCNDPFLGVYYHKNNKSWMESEFRVYSSANNCTFEYVSQPFLMDLEGKQGNFKNLREFVFKNIDGYFKIYSKHTPINLVRDLPQGFSALEPLVDLPIGINITRFQTLLALHRSYLTPGDSSSGWTAGAAAYYVGYLQPRTFLLKYNENGTITDAVDCALDPLSETKCTLKSFTVEKGIYQTSNFRVQPTESIVRFPNITNLCPFGEVFNATRFASVYAWNRKRISNCVADYSVLYNSASFSTFKCYGVSPTKLNDLCFTNVYADSFVIRGDEVRQIAPGQTGKIADYNYKLPDDFTGCVIAWNSNNLDSKVGGNYNYLYRLFRKSNLKPFERDISTEIYQAGSTPCNGVEGFNCYFPLQSYGFQPTNGVGYQPYRVVVLSFELLHAPATVCGPKKSTNLVKNKCVNFNFNGLTGTGVLTESNKKFLPFQQFGRDILDYTDAVRDPQTLEILDITPCSFGGVSVITPGTNTSNQVAVLYQDVNCTEVPVAIHADQLTPTWRVYSTGSNVFQTRAGCLIGAEHVNNSYECDIPIGAGICASYQTQTNSPGSASSVASQSIIAYTMSLGAENSVAYSNNSIAIPTNFTISVTTEILPVSMTKTSVDCTMYICGDSTECSNLLLQYGSFCTQLNRALTGIAVEQDKNTQEVFAQVKQIYKTPPIKDFGGFNFSQILPDPSKPSKRSFIEDLLFNKVTLADAGFIKQYGDCLGDIAARDLICAQKYIGLTVLPPLLTDEMIAQYTSALLAGTITSGWTFGAGAALQIPFAMQMAYRFNGIGVTQNVLYENQKLIANQFNSAIGKIQDSLSSTASALGKLQDVVNQNAQALNTLVKQLSSNFGAISSVLNDILSRLDPPEAEVQIDRLITGRLQSLQTYVTQQLIRAAEIRASANLAATKMSECVLGQSKRVDFCGKGYHLMSFPQSAPHGVVFLHVTYVPAQEKNFTTAPAICHDGKAHFPREGVFVSNGTHWFVTQRNFYEPQIITTDNTFVSGNCDVVIGIVNNTVYDPLQPELDSFKEELDKYFKNHTSPDVDLGDISGINASVVNIQKEIDRLNEVAKNLNESLIDLQELGKYEQ

SEQ ID NO: 23 - protein, 1208 aa, Artificial Sequence
  Description of Artificial Sequence: Synthetic polypeptide
MFVFLVLLPLVSSQCVNLTTRTQLPPAYTNSFTRGVYYPDKVFRSSVLHSTQDLFLPFFSNVTWFHAIHVSGTNGTKRFDNPVLPFNDGVYFASTEKSNIIRGWIFGTTLDSKTQSLLIVNNATNVVIKVCEFQFCNDPFLGVYYHKNNKSWMESEFRVYSSANNCTFEYVSQPFLMDLEGKQGNFKNLREFVFKNIDGYFKIYSKHTPINLVRDLPQGFSALEPLVDLPIGINITRFQTLLALHRSYLTPGDSSSGWTAGAAAYYVGYLQPRTFLLKYNENGTITDAVDCALDPLSETKCTLKSFTVEKGIYQTSNFRVQPTESIVRFPNITNLCPFGEVFNATRFASVYAWNRKRISNCVADYSVLYNSASFSTFKCYGVSPTKLNDLCFTNVYADSFVIRGDEVRQIAPGQTGKIADYNYKLPDDFTGCVIAWNSNNLDSKVGGNYNYLYRLFRKSNLKPFERDISTEIYQAGSTPCNGVEGFNCYFPLQSYGFQPTNGVGYQPYRVVVLSFELLHAPATVCGPKKSTNLVKNKCVNFNFNGLTGTGVLTESNKKFLPFQQFGRDILDFTDAVRDPQTLEILDITPCSFGGVSVITPGTNTSNQVAVLYQDVNCTEVPVAIHADQLTPTWRVYSTGSNVFQTRAGCLIGAEHVNNSYECDIPIGAGICASYQTQTNSPGSASSVASQSIIAYTMSLGAENSVAYSNNSIAIPTNFTISVTTEILPVSMTKTSVDCTMYICGDSTECSNLLLQYGSFCTQLNRALTGIAVEQDKNTQEVFAQVKQIYKTPPIKDFGGFNFSQILPDPSKPSKRSFIEDLLFNKVTLADAGFIKQYGDCLGDIAARDLICAQKYIGLTVLPPLLTDEMIAQYTSALLAGTITSGWTFGAGAALQIPFAMQMAYRFNGIGVTQNVLYENQKLIANQFNSAIGKIQDSLSSTASALGKLQDVVNQNAQALNTLVKQLSSNFGAISSVLNDILSRLDPPEAEVQIDRLITGRLQSLQTYVTQQLIRAAEIRASANLAATKMSECVLGQSKRVDFCGKGYHLMSFPQSAPHGVVFLHVTYVPAQEKNFTTAPAICHDGKAHFPREGVFVSNGTHWFVTQRNFYEPQIITTDNTFVSGNCDVVIGIVNNTVYDPLQPELDSFKEELDKYFKNHTSPDVDLGDISGINASVVNIQKEIDRLNEVAKNLNESLIDLQELGKYEQ

SEQ ID NO: 24 - protein, 1208 aa, Artificial Sequence
  Description of Artificial Sequence: Synthetic polypeptide
MFVFLVLLPLVSSQCVNLTTRTQLPPAYTNSFTRGVYYPDKVFRSSVLHSTQDLFLPFFSNVTWFHAIHVSGTNGTKRFDNPVLPFNDGVYFASTEKSNIIRGWIFGTTLDSKTQSLLIVNNATNVVIKVCEFQFCNDPFLGVYYHKNNKSWMESEFRVYSSANNCTFEYVSQPFLMDLEGKQGNFKNLREFVFKNIDGYFKIYSKHTPINLVRDLPQGFSALEPLVDLPIGINITRFQTLLALHRSYLTPGDSSSGWTAGAAAYYVGYLQPRTFLLKYNENGTITDAVDCALDPLSETKCTLKSFTVEKGIYQTSNFRVQPTESIVRFPNITNLCPFGEVFNATRFASVYAWNRKRISNCVADYSVLYNSASFSTFKCYGVSPTKLNDLCFTNVYADSFVIRGDEVRQIAPGQTGKIADYNYKLPDDFTGCVIAWNSNNLDSKVGGNYNYLYRLFRKSNLKPFERDISTEIYQAGSTPCNGVEGFNCYFPLQSYGFQPTNGVGYQPYRVVVLSFELLHAPATVCGPKKSTNLVKNKCVNFNFNGLTGTGVLTESNKKFLPFQQFGRDIVDVTDAVRDPQTLEILDITPCSFGGVSVITPGTNTSNQVAVLYQDVNCTEVPVAIHADQLTPTWRVYSTGSNVFQTRAGCLIGAEHVNNSYECDIPIGAGICASYQTQTNSPGSASSVASQSIIAYTMSLGAENSVAYSNNSIAIPTNFTISVTTEILPVSMTKTSVDCTMYICGDSTECSNLLLQYGSFCTQLNRALTGIAVEQDKNTQEVFAQVKQIYKTPPIKDFGGFNFSQILPDPSKPSKRSFIEDLLFNKVTLADAGFIKQYGDCLGDIAARDLICAQKFIGLTVLPPLLTDEMIAQYTSALLAGTITSGWTFGAGAALQIPFAMQMAYRFNGIGVTQNVLYENQKLIANQFNSAIGKIQDSLSSTASALGKLQDVVNQNAQALNTLVKQLSSNFGAISSVLNDILSRLDPPEAEVQIDRLITGRLQSLQTYVTQQLIRAAEIRASANLAATKMSECVLGQSKRVDFCGKGYHLMSFPQSAPHGVVFLHVTYVPAQEKNFTTAPAICHDGKAHFPREGVFVSNGTHWFVTQRNFYEPQIITTDNTFVSGNCDVVIGIVNNTVYDPLQPELDSFKEELDKYFKNHTSPDVDLGDISGINASVVNIQKEIDRLNEVAKNLNESLIDLQELGKYEQ

SEQ ID NO: 25 - protein, 1208 aa, Artificial Sequence
  Description of Artificial Sequence: Synthetic polypeptide
MFVFLVLLPLVSSQCVNLTTRTQLPPAYTNSFTRGVYYPDKVFRSSVLHSTQDLFLPFFSNVTWFHAIHVSGTNGTKRFDNPVLPFNDGVYFASTEKSNIIRGWIFGTTLDSKTQSLLIVNNATNVVIKVCEFQFCNDPFLGVYYHKNNKSWMESEFRVYSSANNCTFEYVSQPFLMDLEGKQGNFKNLREFVFKNIDGYFKIYSKHTPINLVRDLPQGFSALEPLVDLPIGINITRFQTLLALHRSYLTPGDSSSGWTAGAAAYYVGYLQPRTFLLKYNENGTITDAVDCALDPLSETKCTLKSFTVEKGIYQTSNFRVQPTESIVRFPNITNLCPFGEVFNATRFASVYAWNRKRISNCVADYSVLYNSASFSTFKCYGVSPTKLNDLCFTNVYADSFVIRGDEVRQIAPGQTGKIADYNYKLPDDFTGCVIAWNSNNLDSKVGGNYNYLYRLFRKSNLKPFERDISTEIYQAGSTPCNGVEGFNCYFPLQSYGFQPTNGVGYQPYRVVVLSFELLHAPATVCGPKKSTNLVKNKCVNFNFNGLTGTGVLTESNKKFLPFQQFGRDILDTTDAVRDPQTLEILDITPCSFGGVSVITPGTNTSNQVAVLYQDVNCTEVPVAIHADQLTPTWRVYSTGSNVFQTRAGCLIGAEHVNNSYECDIPIGAGICASYQTQTNSPGSASSVASQSIIAYTMSLGAENSVAYSNNSIAIPTNFTISVTTEILPVSMTKTSVDCTMYICGDSTECSNLLLQYGSFCTQLNRALTGIAVEQDKNTQEVFAQVKQIYKTPPIKDFGGFNFSQILPDPSKPSKRSFIEDLLFNKVTLADAGFIKQYGDCLGDIAARDLICAQKFIGLTVLPPLLTDEMIAQYTSALLAGTITSGWTFGAGAALQIPFAMQMAYRFNGIGVTQNVLYENQKLIANQFNSAIGKIQDSLSSTASALGKLQDVVNQNAQALNTLVKQLSSNFGAISSVLNDILSRLDPPEAEVQIDRLITGRLQSLQTYVTQQLIRAAEIRASANLAATKMSECVLGQSKRVDFCGKGYHLMSFPQSAPHGVVFLHVTYVPAQEKNFTTAPAICHDGKAHFPREGVFVSNGTHWFVTQRNFYEPQIITTDNTFVSGNCDVVIGIVNNTVYDPLQPELDSFKEELDKYFKNHTSPDVDLGDISGINASVVNIQKEIDRLNEVAKNLNESLIDLQELGKYEQ

SEQ ID NO: 26 - protein, 1208 aa, Artificial Sequence
  Description of Artificial Sequence: Synthetic polypeptide
MFVFLVLLPLVSSQCVNLTTRTQLPPAYTNSFTRGVYYPDKVFRSSVLHSTQDLFLPFFSNVTWFHAIHVSGTNGTKRFDNPVLPFNDGVYFASTEKSNIIRGWIFGTTLDSKTQSLLIVNNATNVVIKVCEFQFCNDPFLGVYYHKNNKSWMESEFRVYSSANNCTFEYVSQPFLMDLEGKQGNFKNLREFVFKNIDGYFKIYSKHTPINLVRDLPQGFSALEPLVDLPIGINITRFQTLLALHRSYLTPGDSSSGWTAGAAAYYVGYLQPRTFLLKYNENGTITDAVDCALDPLSETKCTLKSFTVEKGIYQTSNFRVQPTESIVRFPNITNLCPFGEVFNATRFASVYAWNRKRISNCVADYSVLYNSASFSTFKCYGVSPTKLNDLCFTNVYADSFVIRGDEVRQIAPGQTGKIADYNYKLPDDFTGCVIAWNSNNLDSKVGGNYNYLYRLFRKSNLKPFERDISTEIYQAGSTPCNGVEGFNCYFPLQSYGFQPTNGVGYQPYRVVVLSFELLHAPATVCGPKKSTNLVKNKCVNFNFNGLTGTGVLTESNKKFLPFQQFGRDICDTTDAVRDPQTLEILDITPCSFGGVSVITPGTNTSNQVAVLYQDVNCTEVPVAIHADQLTPTWRVYSTGSNVFQTRAGCLIGAEHVNNSYECDIPIGAGICASYQTQTNSPGSASSVASQSIIAYTMSLGAENSVAYSNNSIAIPTNFTISVTTEILPVSMTKTSVDCTMYICGDSTECSNLLLQYGSFCTQLNRALTGIAVEQDKNTQEVFAQVKQIYKTPPIKDFGGFNFSQILPDPSKPSKRSFIEDLLFNKVTLADAGFIKQYGDCLGDIAARDLICAQKFNGLTVLPPLLTDEMIAQYTSALLAGTITSGWTFGAGAALQIPFAMQMAYRFNGIGVTQNVLYENQKLIANQFNSAIGKIQDSLSSTASALGKLQDVVNQNAQALNTLCKQLSSNFGAISSVLNDILSRLDPPEAEVQIDRLITGRLQSLQTYVTQQLIRAAEIRASANLAATKMSECVLGQSKRVDFCGKGYHLMSFPQSAPHGVVFLHVTYVPAQEKNFTTAPAICHDGKAHFPREGVFVSNGTHWFVTQRNFYEPQIITTDNTFVSGNCDVVIGIVNNTVYDPLQPELDSFKEELDKYFKNHTSPDVDLGDISGINASVVNIQKEIDRLNEVAKNLNESLIDLQELGKYEQ

SEQ ID NO: 27 - protein, 1208 aa, Artificial Sequence
  Description of Artificial Sequence: Synthetic polypeptide
MFVFLVLLPLVSSQCVNLTTRTQLPPAYTNSFTRGVYYPDKVFRSSVLHSTQDLFLPFFSNVTWFHAIHVSGTNGTKRFDNPVLPFNDGVYFASTEKSNIIRGWIFGTTLDSKTQSLLIVNNATNVVIKVCEFQFCNDPFLGVYYHKNNKSWMESEFRVYSSANNCTFEYVSQPFLMDLEGKQGNFKNLREFVFKNIDGYFKIYSKHTPINLVRDLPQGFSALEPLVDLPIGINITRFQTLLALHRSYLTPGDSSSGWTAGAAAYYVGYLQPRTFLLKYNENGTITDAVDCALDPLSETKCTLKSFTVEKGIYQTSNFRVQPTESIVRFPNITNLCPFGEVFNATRFASVYAWNRKRISNCVADYSVLYNSASFSTFKCYGVSPTKLNDLCFTNVYADSFVIRGDEVRQIAPGQTGKIADYNYKLPDDFTGCVIAWNSNNLDSKVGGNYNYLYRLFRKSNLKPFERDISTEIYQAGSTPCNGVEGFNCYFPLQSYGFQPTNGVGYQPYRVVVLSFELLHAPATVCGPKKSTNLVKNKCVNFNFNGLCGTGVLTESNKKFLPFQQFGRDIADTTDAVRDPQTLEILDITPCSFGGVSVITPGTNTSNQVAVLYQDVNCTEVPVAIHADQLTPTWRVYSTGSNVFQTRAGCLIGAEHVNNSYECDIPIGAGICASYQTQTNSPGSASSVASQSIIAYTMSLGAENSVAYSNNSIAIPTNFTISVTTEILPVSMTKTSVDCTMYICGDSTECSNLLLQYGSFCTQLNRALTGIAVEQDKNTQEVFAQVKQIYKTPPIKDFGGFNFSQILPDPSKPSKRSFIEDLLFNKVTLADAGFIKQYGDCLGDIAARDLICAQKFNGLTVLPPLLTDEMIAQYTSALLAGTITSGWTFGAGAALQIPFAMQMAYRFNGIGVTQNVLYENQKLIANQFNSAIGKIQDSLSSTASALGKLQDVVNQNAQALNTLVKQLSSNFGAISSVLNDILCRLDPPEAEVQIDRLITGRLQSLQTYVTQQLIRAAEIRASANLAATKMSECVLGQSKRVDFCGKGYHLMSFPQSAPHGVVFLHVTYVPAQEKNFTTAPAICHDGKAHFPREGVFVSNGTHWFVTQRNFYEPQIITTDNTFVSGNCDVVIGIVNNTVYDPLQPELDSFKEELDKYFKNHTSPDVDLGDISGINASVVNIQKEIDRLNEVAKNLNESLIDLQELGKYEQ

SEQ ID NO: 28 - protein, 1208 aa, Artificial Sequence
  Description of Artificial Sequence: Synthetic polypeptide
MFVFLVLLPLVSSQCVNLTTRTQLPPAYTNSFTRGVYYPDKVFRSSVLHSTQDLFLPFFSNVTWFHAIHVSGTNGTKRFDNPVLPFNDGVYFASTEKSNIIRGWIFGTTLDSKTQSLLIVNNATNVVIKVCEFQFCNDPFLGVYYHKNNKSWMESEFRVYSSANNCTFEYVSQPFLMDLEGKQGNFKNLREFVFKNIDGYFKIYSKHTPINLVRDLPQGFSALEPLVDLPIGINITRFQTLLALHRSYLTPGDSSSGWTAGAAAYYVGYLQPRTFLLKYNENGTITDAVDCALDPLSETKCTLKSFTVEKGIYQTSNFRVQPTESIVRFPNITNLCPFGEVFNATRFASVYAWNRKRISNCVADYSVLYNSASFSTFKCYGVSPTKLNDLCFTNVYADSFVIRGDEVRQIAPGQTGKIADYNYKLPDDFTGCVIAWNSNNLDSKVGGNYNYLYRLFRKSNLKPFERDISTEIYQAGSTPCNGVEGFNCYFPLQSYGFQPTNGVGYQPYRVVVLSFELLHAPATVCGPKKSTNLVKNKCVNFNFNGLTGTGVLTESNKKFLPFQQFGRDICDTTDAVRDPQTLEILDITPCSFGGVSVITPGTNTSNQVAVLYQDVNCTEVPVAIHADQLTPTWRVYSTGSNVFQTRAGCLIGAEHVNNSYECDIPIGAGICASYQTQTNSPGSASSVASQSIIAYTMSLGAENSVAYSNNSIAIPTNFTISVTTEILPVSMTKTSVDCTMYICGDSTECSNLLLQYGSFCTQLNRALTGIAVEQDKNTQEVFAQVKQIYKTPPIKDFGGFNFSQILPDPSKPSKRSFIEDLLFNKVTLADAGFIKQYGDCLGDIAARDLICAQKFNGLTVLPPLLTDEMIAQYTSALLAGTITSGWTFGAGAALQIPFAMQMAYRFNGIGVTQNVLYENQKLIANQFNSAIGKIQDSLSSTASALGKLQDVVNQNAQALNTLVKQCSSNFGAISSVLNDILSRLDPPEAEVQIDRLITGRLQSLQTYVTQQLIRAAEIRASANLAATKMSECVLGQSKRVDFCGKGYHLMSFPQSAPHGVVFLHVTYVPAQEKNFTTAPAICHDGKAHFPREGVFVSNGTHWFVTQRNFYEPQIITTDNTFVSGNCDVVIGIVNNTVYDPLQPELDSFKEELDKYFKNHTSPDVDLGDISGINASVVNIQKEIDRLNEVAKNLNESLIDLQELGKYEQ

SEQ ID NO: 29 - protein, 1208 aa, Artificial Sequence; identical to SEQ ID NO: 28
  Description of Artificial Sequence: Synthetic polypeptide

SEQ ID NO: 30 - protein, 1208 aa, Artificial Sequence
  Description of Artificial Sequence: Synthetic polypeptide
MFVFLVLLPLVSSQCVNLTTRTQLPPAYTNSFTRGVYYPDKVFRSSVLHSTQDLFLPFFSNVTWFHAIHVSGTNGTKRFDNPVLPFNDGVYFASTEKSNIIRGWIFGTTLDSKTQSLLIVNNATNVVIKVCEFQFCNDPFLGVYYHKNNKSWMESEFRVYSSANNCTFEYVSQPFLMDLEGKQGNFKNLREFVFKNIDGYFKIYSKHTPINLVRDLPQGFSALEPLVDLPIGINITRFQTLLALHRSYLTPGDSSSGWTAGAAAYYVGYLQPRTFLLKYNENGTITDAVDCALDPLSETKCTLKSFTVEKGIYQTSNFRVQPTESIVRFPNITNLCPFGEVFNATRFASVYAWNRKRISNCVADYSVLYNSASFSTFKCYGVSPTKLNDLCFTNVYADSFVIRGDEVRQIAPGQTGKIADYNYKLPDDFTGCVIAWNSNNLDSKVGGNYNYLYRLFRKSNLKPFERDISTEIYQAGSTPCNGVEGFNCYFPLQSYGFQPTNGVGYQPYRVVVLSFELLHAPATVCGPKKSTNLVKNKCVNFNFNGLTGTGVLTESNKKFLPFQQFGRDIACTTDAVRDPQTLEILDITPCSFGGVSVITPGTNTSNQVAVLYQDVNCTEVPVAIHADQLTPTWRVYSTGSNVFQTRAGCLIGAEHVNNSYECDIPIGAGICASYQTQTNSPGSASSVASQSIIAYTMSLGAENSVAYSNNSIAIPTNFTISVTTEILPVSMTKTSVDCTMYICGDSTECSNLLLQYGSFCTQLNRALTGIAVEQDKNTQEVFAQVKQIYKTPPIKDFGGFNFSQILPDPSKPSKRSFIEDLLFNKVTLADAGFIKQYGDCLGDIAARDLICAQKFNGLTVLPPLLTDEMIAQYTSALLAGTITSGWTFGAGAALQIPFAMQMAYRFNGIGVTQNVLYENQKLIANQFNSAIGKIQDSLSSTASALGKLQDVVNQNAQALNTLVKQLCSNFGAISSVLNDILSRLDPPEAEVQIDRLITGRLQSLQTYVTQQLIRAAEIRASANLAATKMSECVLGQSKRVDFCGKGYHLMSFPQSAPHGVVFLHVTYVPAQEKNFTTAPAICHDGKAHFPREGVFVSNGTHWFVTQRNFYEPQIITTDNTFVSGNCDVVIGIVNNTVYDPLQPELDSFKEELDKYFKNHTSPDVDLGDISGINASVVNIQKEIDRLNEVAKNLNESLIDLQELGKYEQ

SEQ ID NO: 31 - protein, 1208 aa, Artificial Sequence
  Description of Artificial Sequence: Synthetic polypeptide
MFVFLVLLPLVSSQCVNLTTRTQLPPAYTNSFTRGVYYPDKVFRSSVLHSTQDLFLPFFSNVTWFHAIHVSGTNGTKRFDNPVLPFNDGVYFASTEKSNIIRGWIFGTTLDSKTQSLLIVNNATNVVIKVCEFQFCNDPFLGVYYHKNNKSWMESEFRVYSSANNCTFEYVSQPFLMDLEGKQGNFKNLREFVFKNIDGYFKIYSKHTPINLVRDLPQGFSALEPLVDLPIGINITRFQTLLALHRSYLTPGDSSSGWTAGAAAYYVGYLQPRTFLLKYNENGTITDAVDCALDPLSETKCTLKSFTVEKGIYQTSNFRVQPTESIVRFPNITNLCPFGEVFNATRFASVYAWNRKRISNCVADYSVLYNSASFSTFKCYGVVPTLLNDLCFTNVYADSFVIRGDEVRQIAPGQTGKIADYNYKLPDDFTGCVIAWNSNNLDSKVGGNYNYLYRLFRKSNLKPFERDISTEIYQAGSTPCNGVEGFNCYFPLQSYGFQPTNGVGYQPYRVVVLSFELLHAPATVCGPKKSTNLVKNKCVNFNFNGLTGTGVLTESNKKFLPFQQFGRDIADTTDAVRDPQTLEILDITPCSFGGVSVITPGTNTSNQVAVLYQDVNCTEVPVAIHADQLTPTWRVYSTGSNVFQTRAGCLIGAEHVNNSYECDIPIGAGICASYQTQTNSPGSASSVASQSIIAYTMSLGAENSVAYSNNSIAIPTNFTISVTTEILPVSMTKTSVDCTMYICGDSTECSNLLLQYGSFCTQLNRALTGIAVEQDKNTQEVFAQVKQIYKTPPIKDFGGFNFSQILPDPSKPSKRSFIEDLLFNKVTLADAGFIKQYGDCLGDIAARDLICAQKFNGLTVLPPLLTDEMIAQYTSALLAGTITSGWTFGAGAALQIPFAMQMAYRFNGIGVTQNVLYENQKLIANQFNSAIGKIQDSLSSTASALGKLQDVVNQNAQALNTLVKQLSSNFGAISSVLNDILSRLIPPEAEVQIDRLITGRLQSLQTYVTQQLIRAAEIRASANLAATKMSECVLGQSKRVDFCGKGYHLMSFPQSAPHGVVFLHVTYVPAQEKNFTTAPAICHDGKAHFPREGVFVSNGTHWFVTQRNFYEPQIITTDNTFVSGNCDVVIGIVNNTVYDPLQPELDSFKEELDKYFKNHTSPDVDLGDISGINASVVNIQKEIDRLNEVAKNLNESLIDLQELGKYEQ

SEQ ID NO: 32 - protein, 1208 aa, Artificial Sequence
  Description of Artificial Sequence: Synthetic polypeptide
MFVFLVLLPLVSSQCVNLTTRTQLPPAYTNSFTRGVYYPDKVFRSSVLHSTQDLFLPFFSNVTWFHAIHVSGTNGTKRFDNPVLPFNDGVYFASTEKSNIIRGWIFGTTLDSKTQSLLIVNNATNVVIKVCEFQFCNDPFLGVYYHKNNKSWMESEFRVYSSANNCTFEYVSQPFLMDLEGKQGNFKNLREFVFKNIDGYFKIYSKHTPINLVRDLPQGFSALEPLVDLPIGINITRFQTLLALHRSYLTPGDSSSGWTAGAAAYYVGYLQPRTFLLKYNENGTITDAVDCALDPLSETKCTLKSFTVEKGIYQTSNFRVQPTESIVRFPNITNLCPFGEVFNATRFASVYAWNRKRISNCVADYSVLYNSASFSTFKCYGVSPTLLNDLCFTNVYADSFVIRGDEVRQIAPGQTGKIADYNYKLPDDFTGCVIAWNSNNLDSKVGGNYNYLYRLFRKSNLKPFERDISTEIYQAGSTPCNGVEGFNCYFPLQSYGFQPTNGVGYQPYRVVVLSFELLHAPATVCGPKKSTNLVKNKCVNFNFNGLTGTGVLTESNKKFLPFQQFGRDIADTTDAVRDPQTLEILDITPCSFGGVSVITPGTNTSNQVAVLYQDVNCTEVPVAIHADQLTPTWRVYSTGSNVFQTRAGCLIGAEHVNNSYECDIPIGAGICASYQTQTNSPGSASSVASQSIIAYTMSLGAENSVAYSNNSIAIPTNFTISVTTEILPVSMTKTSVDCTMYICGDSTECSNLLLQYGSFCTQLNRALTGIAVEQDKNTQEVFAQVKQIYKTPPIKDFGGFNFSQILPDPSKPSKRSFIEDLLFNKVTLADAGFIKQYGDCLGDIAARDLICAQKFNGLTVLPPLLTDEMIAQYTSALLAGTITSGWTFGAGAALQIPFAMQMAYRFNGIGVTQNVLYENQKLIANQFNSAIGKIQDSLSSTASALGKLQDVVNQNAQALNTLVKQLSSNFGAISSVLNDILSRLIPPEAEVQIDRLITGRLQSLQTYVTQQLIRAAEIRASANLAATKMSECVLGQSKRVDFCGKGYHLMSFPQSAPHGVVFLHVTYVPAQEKNFTTAPAICHDGKAHFPREGVFVSNGTHWFVTQRNFYEPQIITTDNTFVSGNCDVVIGIVNNTVYDPLQPELDSFKEELDKYFKNHTSPDVDLGDISGINASVVNIQKEIDRLNEVAKNLNESLIDLQELGKYEQ

SEQ ID NO: 33 - protein, 1208 aa, Artificial Sequence
  Description of Artificial Sequence: Synthetic polypeptide
MFVFLVLLPLVSSQCVNLTTRTQLPPAYTNSFTRGVYYPDKVFRSSVLHSTQDLFLPFFSNVTWFHAIHVSGTNGTKRFDNPVLPFNDGVYFASTEKSNIIRGWIFGTTLDSKTQSLLIVNNATNVVIKVCEFQFCNDPFLGVYYHKNNKSWMESEFRVYSSANNCTFEYVSQPFLMDLEGKQGNFKNLREFVFKNIDGYFKIYSKHTPINLVRDLPQGFSALEPLVDLPIGINITRFQTLLALHRSYLTPGDSSSGWTAGAAAYYVGYLQPRTFLLKYNENGTITDAVDCALDPLSETKCTLKSFTVEKGIYQTSNFRVQPTESIVRFPNITNLCPFGEVFNATRFASVYAWNRKRISNCVADYSVLYNSASFSTFKCYGMVPTLLNDLCFTNVYADSFVIRGDEVRQIAPGQTGKIADYNYKLPDDFTGCVIAWNSNNLDSKVGGNYNYLYRLFRKSNLKPFERDISTEIYQAGSTPCNGVEGFNCYFPLQSYGFQPTNGVGYQPYRVVVLSFELLHAPATVCGPKKSTNLVKNKCVNFNFNGLTGTGVLTESNKKFLPFQQFGRDIADTTDAVRDPQTLEILDITPCSFGGVSVITPGTNTSNQVAVLYQDVNCTEVPVAIHADQLTPTWRVYSTGSNVFQTRAGCLIGAEHVNNSYECDIPIGAGICASYQTQTNSPGSASSVASQSIIAYTMSLGAENSVAYSNNSIAIPTNFTISVTTEILPVSMTKTSVDCTMYICGDSTECSNLLLQYGSFCTQLNRALTGIAVEQDKNTQEVFAQVKQIYKTPPIKDFGGFNFSQILPDPSKPSKRSFIEDLLFNKVTLADAGFIKQYGDCLGDIAARDLICAQKFNGLTVLPPLLTDEMIAQYTSALLAGTITSGWTFGAGAALQIPFAMQMAYRFNGIGVTQNVLYENQKLIANQFNSAIGKIQDSLSSTASALGKLQDVVNQNAQALNTLVKQLSSNFGAISSVLNDILSRLIPPEAEVQIDRLITGRLQSLQTYVTQQLIRAAEIRASANLAATKMSECVLGQSKRVDFCGKGYHLMSFPQSAPHGVVFLHVTYVPAQEKNFTTAPAICHDGKAHFPREGVFVSNGTHWFVTQRNFYEPQIITTDNTFVSGNCDVVIGIVNNTVYDPLQPELDSFKEELDKYFKNHTSPDVDLGDISGINASVVNIQKEIDRLNEVAKNLNESLIDLQELGKYEQ

SEQ ID NO: 34 - protein, 1208 aa, Artificial Sequence
  Description of Artificial Sequence: Synthetic polypeptide
MFVFLVLLPLVSSQCVNLTTRTQLPPAYTNSFTRGVYYPDKVFRSSVLHSTQDLFLPFFSNVTWFHAIHVSGTNGTKRFDNPVLPFNDGVYFASTEKSNIIRGWIFGTTLDSKTQSLLIVNNATNVVIKVCEFQFCNDPFLGVYYHKNNKSWMESEFRVYSSANNCTFEYVSQPFLMDLEGKQGNFKNLREFVFKNIDGYFKIYSKHTPINLVRDLPQGFSALEPLVDLPIGINITRFQTLLALHRSYLTPGDSSSGWTAGAAAYYVGYLQPRTFLLKYNENGTITDAVDCALDPLSETKCTLKSFTVEKGIYQTSNFRVQPTESIVRFPNITNLCPFGEVFNATRFASVYAWNRKRISNCVADYSVLYNSASFSTFKCYGMVPTLLNDLCFTNVYADSFVIRGDEVRQIAPGQTGKIADYNYKLPDDFTGCVIAWNSNNLDSKVGGNYNYLYRLFRKSNLKPFERDISTEIYQAGSTPCNGVEGFNCYFPLQSYGFQPTNGVGYQPYRVVVLSFELLHAPATVCGPKKSTNLVKNKCVNFNFNGLTGTGVLTESNKKFLPFQQFGRDIADTTDAVRDPQTLEILDITPCSFGGVSVITPGTNTSNQVAVLYQDVNCTEVPVAIHADQLTPTWRVYSTGSNVFQTRAGCLIGAEHVNNSYECDIPIGAGICASYQTQTNSPGSASSVASQSIIAYTMSLGAENSVAYSNNSIAIPTNFTISVTTEILPVSMTKTSVDCTMYICGDSTECSNLLLQYGSFCTQLNRALTGIAVEQDKNTQEVFAQVKQIYKTPPIKDFGGFNFSQILPDPSKPSKRSFIEDLLFNKVTLADAGFIKQYGDCLGDIAARDLICAQKFNGLTVLPPLLTDEMIAQYTSALLAGTITSGWTFGAGAALQIPFAMQMAYRFNGIGVTQNVLYENQKLIANQFNSAIGKIQDSLSSTASALGKLQDVVNQNAQALNTLVKQLSSNFGAISSVLNDILLRLIPPEAEVQIDRLITGRLQSLQTYVTQQLIRAAEIRASANLAATKMSECVLGQSKRVDFCGKGYHLMSFPQSAPHGVVFLHVTYVPAQEKNFTTAPAICHDGKAHFPREGVFVSNGTHWFVTQRNFYEPQIITTDNTFVSGNCDVVIGIVNNTVYDPLQPELDSFKEELDKYFKNHTSPDVDLGDISGINASVVNIQKEIDRLNEVAKNLNESLIDLQELGKYEQ

SEQ ID NO: 35 - protein, 1208 aa, Artificial Sequence
  Description of Artificial Sequence: Synthetic polypeptide
MFVFLVLLPLVSSQCVNLTTRTQLPPAYTNSFTRGVYYPDKVFRSSVLHSTQDLFLPFFSNVTWFHAIHVSGTNGTKRFDNPVLPFNDGVYFASTEKSNIIRGWIFGTTLDSKTQSLLIVNNATNVVIKVCEFQFCNDPFLGVYYHKNNKSWMESEFRVYSSANNCTFEYVSQPFLMDLEGKQGNFKNLREFVFKNIDGYFKIYSKHTPINLVRDLPQGFSALEPLVDLPIGINITRFQTLLALHRSYLTPGDSSSGWTAGAAAYYVGYLQPRTFLLKYNENGTITDAVDCALDPLSETKCTLKSFTVEKGIYQTSNFRVQPTESIVRFPNITNLCPFGEVFNATRFASVYAWNRKRISNCVADYSVLYNSASFSTFKCYGVCPTKLNDLCFTNVYADSFVIRGDEVRQIAPGQTGKIADYNYKLPDDFTGCVIAWNSNNLDSKVGGNYNYLYRLFRKSNLKPFERDISTEIYQAGSTPCNGVEGFNCYFPLQSYGFQPTNGVGYQPYRVVVLSFELLHAPATVCGPKKSTNLVKNKCVNFNFNGLTGTGVLTESNKKFLPFQQFGRDIADTTDAVRDPQTLEILDITPCSFGGVSVITPGTNTSNQVAVLYQDVNCTEVPVAIHADQLTPTWRVYSTGSNVFQTRAGCLIGAEHVNNSYECDIPIGAGICASYQTQTNSPGSASSVASQSIIAYTMSLGAENSVAYSNNSIAIPTNFTISVTTEILPVSMTKTSVDCTMYICGDSTECSNLLLQYGSFCTQLNRALTGIAVEQDKNTQEVFAQVKQIYKTPPIKDFGGFNFSQILPDPSKPSKRSFIEDLLFNKVTLADAGFIKQYGDCLGDIAARDLICAQKFNGLTVLPPLLTDEMIAQYTSALLAGTITSGWTFGAGAALQIPFAMQMAYRFNGIGVTQNVLYENQKLIANQFNSAIGKIQDSLSSTASALGKLQDVVNQNAQALNTLVKQLSSNFGAISSVLNDILSRLCPPEAEVQIDRLITGRLQSLQTYVTQQLIRAAEIRASANLAATKMSECVLGQSKRVDFCGKGYHLMSFPQSAPHGVVFLHVTYVPAQEKNFTTAPAICHDGKAHFPREGVFVSNGTHWFVTQRNFYEPQIITTDNTFVSGNCDVVIGIVNNTVYDPLQPELDSFKEELDKYFKNHTSPDVDLGDISGINASVVNIQKEIDRLNEVAKNLNESLIDLQELGKYEQ

SEQ ID NO: 36 - protein, 1208 aa, Artificial Sequence
  Description of Artificial Sequence: Synthetic polypeptide
MFVFLVLLPLVSSQCVNLTTRTQLPPAYTNSFTRGVYYPDKVFRSSVLHSTQDLFLPFFSNVTWFHAIHVSGTNGTKRFDNPVLPFNDGVYFASTEKSNIIRGWIFGTTLDSKTQSLLIVNNATNVVIKVCEFQFCNDPFLGVYYHKNNKSWMESEFRVYSSANNCTFEYVSQPFLMDLEGKQGNFKNLREFVFKNIDGYFKIYSKHTPINLVRDLPQGFSALEPLVDLPIGINITRFQTLLALHRSYLTPGDSSSGWTAGAAAYYVGYLQPRTFLLKYNENGTITDAVDCALDPLSETKCTLKSFTVEKGIYQTSNFRVQPTESIVRFPNITNLCPFGEVFNATRFASVYAWNRKRISNCVADYSVLYNSASFSTFKCYGMSPTKLNDLCFTNVYADSFVIRGDEVRQIAPGQTGKIADYNYKLPDDFTGCVIAWNSNNLDSKVGGNYNYLYRLFRKSNLKPFERDISTEIYQAGSTPCNGVEGFNCYFPLQSYGFQPTNGVGYQPYRVVVLSFELLHAPATVCGPKKSTNLVKNKCVNFNFNGLTGTGVLTESNKKFLPFQQFGRDIADTTDAVRDPQTLEILDITPCSFGGVSVITPGTNTSNQVAVLYQDVNCTEVPVAIHADQLTPTWRVYSTGSNVFQTRAGCLIGAEHVNNSYECDIPIGAGICASYQTQTNSPGSASSVASQSIIAYTMSLGAENSVAYSNNSIAIPTNFTISVTTEILPVSMTKTSVDCTMYICGDSTECSNLLLQYGSFCTQLNRALTGIAVEQDKNTQEVFAQVKQIYKTPPIKDFGGFNFSQILPDPSKPSKRSFIEDLLFNKVTLADAGFIKQYGDCLGDIAARDLICAQKFNGLTVLPPLLTDEMIAQYTSALLAGTITSGWTFGAGAALQIPFAMQMAYRFNGIGVTQNVLYENQKLIANQFNSAIGKIQDSLSSTASALGKLQDVVNQNAQALNTLVKQLSSNFGAISSVLNDILSRLDPPEAEVQIDRLITGRLQSLQTYVTQQLIRAAEIRASANLAATKMSECVLGQSKRVDFCGKGYHLMSFPQSAPHGVVFLHVTYVPAQEKNFTTAPAICHDGKAHFPREGVFVSNGTHWFVTQRNFYEPQIITTDNTFVSGNCDVVIGIVNNTVYDPLQPELDSFKEELDKYFKNHTSPDVDLGDISGINASVVNIQKEIDRLNEVAKNLNESLIDLQELGKYEQ

SEQ ID NO: 37 - protein, 1208 aa, Artificial Sequence
  Description of Artificial Sequence: Synthetic polypeptide
MFVFLVLLPLVSSQCVNLTTRTQLPPAYTNSFTRGVYYPDKVFRSSVLHSTQDLFLPFFSNVTWFHAIHVSGTNGTKRFDNPVLPFNDGVYFASTEKSNIIRGWIFGTTLDSKTQSLLIVNNATNVVIKVCEFQFCNDPFLGVYYHKNNKSWMESEFRVYSSANNCTFEYVSQPFLMDLEGKQGNFKNLREFVFKNIDGFFKIYSKHTPINLVRDLPQGFSALEPLVDLPIGINITRFQTLLALHRSYLTPGDSSSGWTAGAAAYYVGYLQPRTFLLKYNENGTITDAVDCALDPLSETKCTLKSFTVEKGIYQTSNFRVQPTESIVRFPNITNLCPFGEVFNATRFASVYAWNRKRISNCVADYSVLYNSASFSTFKCYGVSPTKLNDLCFTNVYALSFVIRGDEVRQIAPGQTGKIADYNYKLPDDFTGCVIAWNSNNLDSKVGGNYNYLYRLFRKSNLKPFERDISTEIYQAGSTPCNGVEGFNCYFPLQSYGFQPTNGVGYQPYRVVVLLFLLLHAPATVCGPKKSTNLVKNKCVNFNFNGLTGTGVLTESNKKFLPFQQFGRDIADTTDAVRDPQTLEILDITPCSFGGVSVITPGTNTSNQVAVLYQDVNCTEVPVAIHADQLTPTWRVYSTGSNVFQTRAGCLIGAEHVNNSYECDIPIGAGICASYQTQTNSPGSASSVASQSIIAYTMSLGAENSVAYSNNSIAIPTNFTISVTTEILPVSMTKTSVDCTMYICGDSTECSNLLLQYGSFCTQLNRALTGIAVEQDKNTQEVFAQVKQIYKTPPIKDFGGFNFSQILPDPSKPSKRSFIEDLLFNKVTLADAGFIKQYGDCLGDIAARDLICAQKFNGLTVLPPLLTDEMIAQYTSALLAGTITSGWTFGAGAALQIPFAMQMAYRFNGIGVTQNVLYENQKLIANQFNSAIGKIQDSLSSTASALGKLQDVVNQNAQALNTLVKQLSSNFGAISSVLNDILSRLDPPEAEVQIDRLITGRLQSLQTYVTQQLIRAAEIRASANLAATKMSECVLGQSKRVDFCGKGYHLMSFPQSAPHGVVFLHVTYVPAQEKNFTTAPAICHDGKAHFPREGVFVSNGTHWFVTQRNFYEPQIITTDNTFVSGNCDVVIGIVNNTVYDPLQPELDSFKEELDKYFKNHTSPDVDLGDISGINASVVNIQKEIDRLNEVAKNLNESLIDLQELGKYEQ

SEQ ID NO: 38 - protein, 1208 aa, Artificial Sequence
  Description of Artificial Sequence: Synthetic polypeptide
MFVFLVLLPLVSSQCVNLTTRTQLPPAYTNSFTRGVYYPDKVFRSSVLHSTQDLFLPFFSNVTWFHAIHVSGTNGTKRFDNPVLPFNDGVYFASTEKSNIIRGWIFGTTLDSKTQSLLIVNNATNVVIKVCEFQFCNDPFLGVYYHKNNKSWMESEFRVYSSANNCTFEYVSQPFLMDLEGKQGNFKNLREFVFKNIDGYFKIYSKHTPINLVRDLPQGFSALEPLVDLPIGINITRFQTLLALHRSYLTPGDSSSGWTAGAAAYYVGYLQPRTFLLKYNENGTITDAVDCALDPLSETKCTLKSFTVEKGIYQTSNFRVQPTESIVRFPNITNLCPFGEVFNATRFASVYAWNRKRISNCVADYSVLYNSASFSTFKCYGVSPTKLNDLCFTNVYALSFVIRGDEVRQIAPGQTGKIADYNYKLPDDFTGCVIAWNSNNLDSKVGGNYNYLYRLFRKSNLKPFERDISTEIYQAGSTPCNGVEGFNCYFPLQSYGFQPTNGVGYQPYRVVVLLFLLLHAPATVCGPKKSTNLVKNKCVNFNFNGLTGTGVLTESNKKFLPFQQFGRDIADTTDAVRDPQTLEILDITPCSFGGVSVITPGTNTSNQVAVLYQDVNCTEVPVAIHADQLTPTWRVYSTGSNVFQTRAGCLIGAEHVNNSYECDIPIGAGICASYQTQTNSPGSASSVASQSIIAYTMSLGAENSVAYSNNSIAIPTNFTISVTTEILPVSMTKTSVDCTMYICGDSTECSNLLLQYGSFCTQLNRALTGIAVEQDKNTQEVFAQVKQIYKTPPIKDFGGFNFSQILPDPSKPSKRSFIEDLLFNKVTLADAGFIKQYGDCLGDIAARDLICAQKFNGLTVLPPLLTDEMIAQYTSALLAGTITSGWTFGAGAALQIPFAMQMAYRFNGIGVTQNVLYENQKLIANQFNSAIGKIQDSLSSTASALGKLQDVVNQNAQALNTLVKQLSSNFGAISSVLNDILSRLDPPEAEVQIDRLITGRLQSLQTYVTQQLIRAAEIRASANLAATKMSECVLGQSKRVDFCGKGYHLMSFPQSAPHGVVFLHVTYVPAQEKNFTTAPAICHDGKAHFPREGVFVSNGTHWFVTQRNFYEPQIITTDNTFVSGNCDVVIGIVNNTVYDPLQPELDSFKEELDKYFKNHTSPDVDLGDISGINASVVNIQKEIDRLNEVAKNLNESLIDLQELGKYEQ

SEQ ID NO: 39 - protein, 1208 aa, Artificial Sequence
  Description of Artificial Sequence: Synthetic polypeptide
MFVFLVLLPLVSSQCVNLTTRTQLPPAYTNSFTRGVYYPDKVFRSSVLHSTQDLFLPFFSNVTWFHAIHVSGTNGTKRFDNPVLPFNDGVYFASTEKSNIIRGWIFGTTLDSKTQSLLIVNNATNVVIKVCEFQFCNDPFLGVYYHKNNKSWMESEFRVYSSANNCTFEYVSQPFLMDLEGKQGNFKNLREFVFKNIDGFFKIYSKHTPINLVRDLPQGFSALEPLVDLPIGINITRFQTLLALHRSYLTPGDSSSGWTAGAAAYYVGYLQPRTFLLKYNENGTITDAVDCALDPLSETKCTLKSFTVEKGIYQTSNFRVQPTESIVRFPNITNLCPFGEVFNATRFASVYAWNRKRISNCVADYSVLYNSASFSTFKCYGVSPTKLNDLCFTNVYADSFVIRGDEVRQIAPGQTGKIADYNYKLPDDFTGCVIAWNSNNLDSKVGGNYNYLYRLFRKSNLKPFERDISTEIYQAGSTPCNGVEGFNCYFPLQSYGFQPTNGVGYQPYRVVVLLFLLLHAPATVCGPKKSTNLVKNKCVNFNFNGLTGTGVLTESNKKFLPFQQFGRDIADTTDAVRDPQTLEILDITPCSFGGVSVITPGTNTSNQVAVLYQDVNCTEVPVAIHADQLTPTWRVYSTGSNVFQTRAGCLIGAEHVNNSYECDIPIGAGICASYQTQTNSPGSASSVASQSIIAYTMSLGAENSVAYSNNSIAIPTNFTISVTTEILPVSMTKTSVDCTMYICGDSTECSNLLLQYGSFCTQLNRALTGIAVEQDKNTQEVFAQVKQIYKTPPIKDFGGFNFSQILPDPSKPSKRSFIEDLLFNKVTLADAGFIKQYGDCLGDIAARDLICAQKFNGLTVLPPLLTDEMIAQYTSALLAGTITSGWTFGAGAALQIPFAMQMAYRFNGIGVTQNVLYENQKLIANQFNSAIGKIQDSLSSTASALGKLQDVVNQNAQALNTLVKQLSSNFGAISSVLNDILSRLDPPEAEVQIDRLITGRLQSLQTYVTQQLIRAAEIRASANLAATKMSECVLGQSKRVDFCGKGYHLMSFPQSAPHGVVFLHVTYVPAQEKNFTTAPAICHDGKAHFPREGVFVSNGTHWFVTQRNFYEPQIITTDNTFVSGNCDVVIGIVNNTVYDPLQPELDSFKEELDKYFKNHTSPDVDLGDISGINASVVNIQKEIDRLNEVAKNLNESLIDLQELGKYEQ

SEQ ID NO: 40 - protein, 1208 aa, Artificial Sequence
  Description of Artificial Sequence: Synthetic polypeptide
MFVFLVLLPLVSSQCVNLTTRTQLPPAYTNSFTRGVYYPDKVFRSSVLHSTQDLFLPFFSNVTWFHAIHVSGTNGTKRFDNPVLPFNDGVYFASTEKSNIIRGWIFGTTLDSKTQSLLIVNNATNVVIKVCEFQFCNDPFLGVYYHKNNKSWMESEFRVYSSANNCTFEYVSQPFLMDLEGKQGNFKNLREFVFKNIDGYFKIYSKHTPINLVRDLPQGFSALEPLVDLPIGINITRFQTLLALHRSYLTPGDSSSGWTAGAAAYYVGYLQPRTFLLKYNENGTITDAVDCALDPLSETKCTLKSFTVEKGIYQTSNFRVQPTESIVRFPNITNLCPFGEVFNATRFASVYAWNRKRISNCVADYSVLYNSASFSTFKCYGVSPTKLNDLCFTNVYADSFVIRGDEVRQIAPGQTGKIADYNYKLPDDFTGCVIAWNSNNLDSKVGGNYNYLYRLFRKSNLKPFERDISTEIYQAGSTPCNGVEGFNCYFPLQSYGFQPTNGVGYQPYRVVVLLFLLLHAPATVCGPKKSTNLVKNKCVNFNFNGLTGTGVLTESNKKFLPFQQFGRDIADTTDAVRDPQTLEILDITPCSFGGVSVITPGTNTSNQVAVLYQDVNCTEVPVAIHADQLTPTWRVYSTGSNVFQTRAGCLIGAEHVNNSYECDIPIGAGICASYQTQTNSPGSASSVASQSIIAYTMSLGAENSVAYSNNSIAIPTNFTISVTTEILPVSMTKTSVDCTMYICGDSTECSNLLLQYGSFCTQLNRALTGIAVEQDKNTQEVFAQVKQIYKTPPIKDFGGFNFSQILPDPSKPSKRSFIEDLLFNKVTLADAGFIKQYGDCLGDIAARDLICAQKFNGLTVLPPLLTDEMIAQYTSALLAGTITSGWTFGAGAALQIPFAMQMAYRFNGIGVTQNVLYENQKLIANQFNSAIGKIQDSLSSTASALGKLQDVVNQNAQALNTLVKQLSSNFGAISSVLNDILSRLDPPEAEVQIDRLITGRLQSLQTYVTQQLIRAAEIRASANLAATKMSECVLGQSKRVDFCGKGYHLMSFPQSAPHGVVFLHVTYVPAQEKNFTTAPAICHDGKAHFPREGVFVSNGTHWFVTQRNFYEPQIITTDNTFVSGNCDVVIGIVNNTVYDPLQPELDSFKEELDKYFKNHTSPDVDLGDISGINASVVNIQKEIDRLNEVAKNLNESLIDLQELGKYEQ

SEQ ID NO: 41 - protein, 1208 aa, Artificial Sequence
  Description of Artificial Sequence: Synthetic polypeptide
MFVFLVLLPLVSSQCVNLTTRTQLPPAYTNSFTRGVYYPDKVFRSSVLHSTQDLFLPFFSNVTWFHAIHVSGTNGTKRFDNPVLPFNDGVYFASTEKSNIIRGWIFGTTLDSKTQSLLIVNNATNVVIKVCEFQFCNDPFLGVYYHKNNKSWMESEFRVYSSANNCTFEYVSQPFLMDLEGKQGNFKNLREFVFKNIDGLFKIYSKHTPINLVRDLPQGFSALEPLVDLPIGINITRFQTLLALHRSYLTPGDSSSGWTAGAAAYYVGYLQPRTFLLKYNENGTITDAVDCALDPLSETKCTLKSFTVEKGIYQTSNFRVQPTESIVRFPNITNLCPFGEVFNATRFASVYAWNRKRISNCVADYSVLYNSASFSTFKCYGVSPTKLNDLCFTNVYADSFVIRGDEVRQIAPGQTGKIADYNYKLPDDFTGCVIAWNSNNLDSKVGGNYNYLYRLFRKSNLKPFERDISTEIYQAGSTPCNGVEGFNCYFPLQSYGFQPTNGVGYQPYRVVVLLFLLLHAPATVCGPKKSTNLVKNKCVNFNFNGLTGTGVLTESNKKFLPFQQFGRDIADTTDAVRDPQTLEILDITPCSFGGVSVITPGTNTSNQVAVLYQDVNCTEVPVAIHADQLTPTWRVYSTGSNVFQTRAGCLIGAEHVNNSYECDIPIGAGICASYQTQTNSPGSASSVASQSIIAYTMSLGAENSVAYSNNSIAIPTNFTISVTTEILPVSMTKTSVDCTMYICGDSTECSNLLLQYGSFCTQLNRALTGIAVEQDKNTQEVFAQVKQIYKTPPIKDFGGFNFSQILPDPSKPSKRSFIEDLLFNKVTLADAGFIKQYGDCLGDIAARDLICAQKFNGLTVLPPLLTDEMIAQYTSALLAGTITSGWTFGAGAALQIPFAMQMAYRFNGIGVTQNVLYENQKLIANQFNSAIGKIQDSLSSTASALGKLQDVVNQNAQALNTLVKQLSSNFGAISSVLNDILSRLDPPEAEVQIDRLITGRLQSLQTYVTQQLIRAAEIRASANLAATKMSECVLGQSKRVDFCGKGYHLMSFPQSAPHGVVFLHVTYVPAQEKNFTTAPAICHDGKAHFPREGVFVSNGTHWFVTQRNFYEPQIITTDNTFVSGNCDVVIGIVNNTVYDPLQPELDSFKEELDKYFKNHTSPDVDLGDISGINASVVNIQKEIDRLNEVAKNLNESLIDLQELGKYEQ

SEQ ID NO: 42 - protein, 1208 aa, Artificial Sequence
  Description of Artificial Sequence: Synthetic polypeptide
MFVFLVLLPLVSSQCVNLTTRTQLPPAYTNSFTRGVYYPDCVFRSSVLHSTQDLFLPFFSNVTWFHAIHVSGTNGTKRFDNPVLPFNDGVYFASTEKSNIIRGWIFGTTLDSKTQSLLIVNNATNVVIKVCEFQFCNDPFLGVYYHKNNKSWMESEFRVYSSANNCTFEYVSQPFLMDLEGKQGNFKNLREFVFKNIDGYFKIYSKHTPINLVRDLPQGFSALEPLVDLPIGINITRFQTLLALHRSYLTPGDSSSGWTAGAAAYYVGYLQPRTFLLKYNENGTITDAVDCALDPLSETKCTLKSFTVEKGIYQTSNFRVQPTESIVRFPNITNLCPFGEVFNATRFASVYAWNRKRISNCVADYSVLYNSASFSTFKCYGVSPTKLNDLCFTNVYADSFVIRGDEVRQIAPGQTGKIADYNYKLPDDFTGCVIAWNSNNLDSKVGGNYNYLYRLFRKSNLKPFERDISTEIYQAGSTPCNGVEGFNCYFPLQSYGFQPTNGVGYQPYRVVVLSFELLHCPATVCGPKKSTNLVKNKCVNFNFNGLTGTGVLTESNKKFLPFQQFGRDIADTTDAVRDPQTLEILDITPCSFGGVSVITPGTNTSNQVAVLYQDVNCTEVPVAIHADQLTPTWRVYSTGSNVFQTRAGCLIGAEHVNNSYECDIPIGAGICASYQTQTNSPGSASSVASQSIIAYTMSLGAENSVAYSNNSIAIPTNFTISVTTEILPVSMTKTSVDCTMYICGDSTECSNLLLQYGSFCTQLNRALTGIAVEQDKNTQEVFAQVKQIYKTPPIKDFGGFNFSQILPDPSKPSKRSFIEDLLFNKVTLADAGFIKQYGDCLGDIAARDLICAQKFNGLTVLPPLLTDEMIAQYTSALLAGTITSGWTFGAGAALQIPFAMQMAYRFNGIGVTQNVLYENQKLIANQFNSAIGKIQDSLSSTASALGKLQDVVNQNAQALNTLVKQLSSNFGAISSVLNDILSRLDPPEAEVQIDRLITGRLQSLQTYVTQQLIRAAEIRASANLAATKMSECVLGQSKRVDFCGKGYHLMSFPQSAPHGVVFLHVTYVPAQEKNFTTAPAICHDGKAHFPREGVFVSNGTHWFVTQRNFYEPQIITTDNTFVSGNCDVVIGIVNNTVYDPLQPELDSFKEELDKYFKNHTSPDVDLGDISGINASVVNIQKEIDRLNEVAKNLNESLIDLQELGKYEQ

SEQ ID NO: 43 - protein, 1208 aa, Artificial Sequence
  Description of Artificial Sequence: Synthetic polypeptide
MFVFLVLLPLVSSQCVNLTTRTQLPPAYTNSFTRGVYYPDLVFRSSVLHSTQDLFLPFFSNVTWFHAIHVSGTNGTKRFDNPVLPFNDGVYFASTEKSNIIRGWIFGTTLDSKTQSLLIVNNATNVVIKVCEFQFCNDPFLGVYYHKNNKSWMESEFRVYSSANNCTFEYVSQPFLMDLEGKQGNFKNLREFVFKNIDGYFKIYSKHTPINLVRDLPQGFSALLPLVDLPIGINITRFQTLLALHRSYLTPGDSSSGWTAGAAAYYVGYLQPRTFLLKYNENGTITDAVDCALDPLSETKCTLKSFTVEKGIYQTSNFRVQPTESIVRFPNITNLCPFGEVFNATRFASVYAWNRKRISNCVADYSVLYNSASFSTFKCYGVSPTKLNDLCFTNVYADSFVIRGDEVRQIAPGQTGKIADYNYKLPDDFTGCVIAWNSNNLDSKVGGNYNYLYRLFRKSNLKPFERDISTEIYQAGSTPCNGVEGFNCYFPLQSYGFQPTNGVGYQPYRVVVLSFELLHAPATVCGPKKSTNLVKNKCVNFNFNGLTGTGVLTESNKKFLPFLQFGRDIADTTDAVRDPQTLEILDITPCSFGGVSVITPGTNTSNQVAVLYQDVNCTEVPVAIHADQLTPTWRVYSTGSNVFQTRAGCLIGAEHVNNSYECDIPIGAGICASYQTQTNSPGSASSVASQSIIAYTMSLGAENSVAYSNNSIAIPTNFTISVTTEILPVSMTKTSVDCTMYICGDSTECSNLLLQYGSFCTQLNRALTGIAVEQDKNTQEVFAQVKQIYKTPPIKDFGGFNFSQILPDPSKPSKRSFIEDLLFNKVTLADAGFIKQYGDCLGDIAARDLICAQKFNGLTVLPPLLTDEMIAQYTSALLAGTITSGWTFGAGAALQIPFAMQMAYRFNGIGVTQNVLYENQKLIANQFNSAIGKIQDSLSSTASALGKLQDVVNQNAQALNTLVKQLSSNFGAISSVLNDILSRLDPPEAEVQIDRLITGRLQSLQTYVTQQLIRAAEIRASANLAATKMSECVLGQSKRVDFCGKGYHLMSFPQSAPHGVVFLHVTYVPAQEKNFTTAPAICHDGKAHFPREGVFVSNGTHWFVTQRNFYEPQIITTDNTFVSGNCDVVIGIVNNTVYDPLQPELDSFKEELDKYFKNHTSPDVDLGDISGINASVVNIQKEIDRLNEVAKNLNESLIDLQELGKYEQ

SEQ ID NO: 44 - protein, 1208 aa, Artificial Sequence
  Description of Artificial Sequence: Synthetic polypeptide
MFVFLVLLPLVSSQCVNLTTRTQLPPAYTNSFTRGVYYPDKVFRSSVLHSTQDLFLPFFSNVTWFHAIHVSGTNGTKRFDNPVLPFNDGVYFASTEKSNIIRGWIFGTTLDSKTQSLLIVNNATNVVIKVCEFQFCNDPFLGVYYHKNNKSWMESEFRVYSSANNCTFEYVSQPFLMDLEGKQGNFKNLREFVFKNIDGYFKIYSKHTPINLVRDLPQGFSALLPLVDLPIGINITRFQTLLALHRSYLTPGDSSSGWTAGAAAYYVGYLQPRTFLLKYNENGTITDAVDCALDPLSETKCTLKSFTVEKGIYQTSNFRVQPTESIVRFPNITNLCPFGEVFNATRFASVYAWNRKRISNCVADYSVLYNSASFSTFKCYGVSPTKLNDLCFTNVYADSFVIRGDEVRQIAPGQTGKIADYNYKLPDDFTGCVIAWNSNNLDSKVGGNYNYLYRLFRKSNLKPFERDISTEIYQAGSTPCNGVEGFNCYFPLQSYGFQPTNGVGYQPYRVVVLSFELLHAPATVCGPKKSTNLVKNKCVNFNFNGLTGTGVLTESNKKFLPFLQFGRDIADTTDAVRDPQTLEILDITPCSFGGVSVITPGTNTSNQVAVLYQDVNCTEVPVAIHADQLTPTWRVYSTGSNVFQTRAGCLIGAEHVNNSYECDIPIGAGICASYQTQTNSPGSASSVASQSIIAYTMSLGAENSVAYSNNSIAIPTNFTISVTTEILPVSMTKTSVDCTMYICGDSTECSNLLLQYGSFCTQLNRALTGIAVEQDKNTQEVFAQVKQIYKTPPIKDFGGFNFSQILPDPSKPSKRSFIEDLLFNKVTLADAGFIKQYGDCLGDIAARDLICAQKFNGLTVLPPLLTDEMIAQYTSALLAGTITSGWTFGAGAALQIPFAMQMAYRFNGIGVTQNVLYENQKLIANQFNSAIGKIQDSLSSTASALGKLQDVVNQNAQALNTLVKQLSSNFGAISSVLNDILSRLDPPEAEVQIDRLITGRLQSLQTYVTQQLIRAAEIRASANLAATKMSECVLGQSKRVDFCGKGYHLMSFPQSAPHGVVFLHVTYVPAQEKNFTTAPAICHDGKAHFPREGVFVSNGTHWFVTQRNFYEPQIITTDNTFVSGNCDVVIGIVNNTVYDPLQPELDSFKEELDKYFKNHTSPDVDLGDISGINASVVNIQKEIDRLNEVAKNLNESLIDLQELGKYEQ

SEQ ID NO: 45 - protein, 1208 aa, Artificial Sequence
  Description of Artificial Sequence: Synthetic polypeptide
MFVFLVLLPLVSSQCVNLTTRTQLPPAYTNSFTRGVYYPDKVFRSSVLHSTQDLFLPFFSNVTWFHAIHVSGTNGTKRFDNPVLPFNDGVYFASTEKSNIIRGWIFGTTLDSKTQSLLIVNNATNVVIKVCEFQFCNDPFLGVYYHKNNKSWMESEFRVYSSANNCTFEYVSQPFLMDLEGKQGNFKNLREFVFKNIDGYFKIYSKHTPINLVRDLPQGFSALYPLVDLPIGINITRFQTLLALHRSYLTPGDSSSGWTAGAAAYYVGYLQPRTFLLKYNENGTITDAVDCALDPLSETKCTLKSFTVEKGIYQTSNFRVQPTESIVRFPNITNLCPFGEVFNATRFASVYAWNRKRISNCVADYSVLYNSASFSTFKCYGVSPTKLNDLCFTNVYADSFVIRGDEVRQIAPGQTGKIADYNYKLPDDFTGCVIAWNSNNLDSKVGGNYNYLYRLFRKSNLKPFERDISTEIYQAGSTPCNGVEGFNCYFPLQSYGFQPTNGVGYQPYRVVVLSFELLHAPATVCGPKKSTNLVKNKCVNFNFNGLTGTGVLTESNKKFLPFLQFGRDIADTTDAVRDPQTLEILDITPCSFGGVSVITPGTNTSNQVAVLYQDVNCTEVPVAIHADQLTPTWRVYSTGSNVFQTRAGCLIGAEHVNNSYECDIPIGAGICASYQTQTNSPGSASSVASQSIIAYTMSLGAENSVAYSNNSIAIPTNFTISVTTEILPVSMTKTSVDCTMYICGDSTECSNLLLQYGSFCTQLNRALTGIAVEQDKNTQEVFAQVKQIYKTPPIKDFGGFNFSQILPDPSKPSKRSFIEDLLFNKVTLADAGFIKQYGDCLGDIAARDLICAQKFNGLTVLPPLLTDEMIAQYTSALLAGTITSGWTFGAGAALQIPFAMQMAYRFNGIGVTQNVLYENQKLIANQFNSAIGKIQDSLSSTASALGKLQDVVNQNAQALNTLVKQLSSNFGAISSVLNDILSRLDPPEAEVQIDRLITGRLQSLQTYVTQQLIRAAEIRASANLAATKMSECVLGQSKRVDFCGKGYHLMSFPQSAPHGVVFLHVTYVPAQEKNFTTAPAICHDGKAHFPREGVFVSNGTHWFVTQRNFYEPQIITTDNTFVSGNCDVVIGIVNNTVYDPLQPELDSFKEELDKYFKNHTSPDVDLGDISGINASVVNIQKEIDRLNEVAKNLNESLIDLQELGKYEQ

SEQ ID NO: 46 - protein, 1208 aa, Artificial Sequence
  Description of Artificial Sequence: Synthetic polypeptide
MFVFLVLLPLVSSQCVNLTTRTQLPPAYTNSFTRGVYYPDKVFRSSVLHSTQDLFLPFFSNVTWFHAIHVSGTNGTKRFDNPVLPFNDGVYFASTEKSNIIRGWIFGTTLDSKTQSLLIVNNATNVVIKVCEFQFCNDPFLGVYYHKNNKSWMESEFRVYSSANNCTFEYVSQPFLMDLEGKQGNFKNLREFVFKNIDGYFKIYSKHTPINLVRDLPQGFSALEPLVDLPIGINITRFQTLLALHRSYLTPGDSSSGWTAGAAAYYVGYLQPRTFLLKYNENGTITDAVDCALDPLSETKCTLKSFTVEKGIYQTSNFRVQPTESIVRFPNITNLCPFGEVFNATRFASVYAWNRKRISNCVADYSVLYNSASFSTFKCYGVSPTKLNDLCFTNVYADSFVIRGDEVRQIAPGQTGKIADYNYKLPDDFTGCVIAWNSNNLDSKVGGNYNYLYRLFRKSNLKPFERDISTEIYQAGSTPCNGVEGFNCYFPLQSYGFQPTNGVGYQPYRVVVLSFELLHAPATVCGPKKSTNLVKNKCVNFNFNGLTGTGVLTESNKKFLPFLQFGRDIADTTDAVRDPQTLEILDITPCSFGGVSVITPGTNTSNQVAVLYQDVNCTEVPVAIHADQLTPTWRVYSTGSNVFQTRAGCLIGAEHVNNSYECDIPIGAGICASYQTQTNSPGSASSVASQSIIAYTMSLGAENSVAYSNNSIAIPTNFTISVTTEILPVSMTKTSVDCTMYICGDSTECSNLLLQYGSFCTQLNRALTGIAVEQDKNTQEVFAQVKQIYKTPPIKDFGGFNFSQILPDPSKPSKRSFIEDLLFNKVTLADAGFIKQYGDCLGDIAARDLICAQKFNGLTVLPPLLTDEMIAQYTSALLAGTITSGWTFGAGAALQIPFAMQMAYRFNGIGVTQNVLYENQKLIANQFNSAIGKIQDSLSSTASALGKLQDVVNQNAQALNTLVKQLSSNFGAISSVLNDILSRLDPPEAEVQIDRLITGRLQSLQTYVTQQLIRAAEIRASANLAATKMSECVLGQSKRVDFCGKGYHLMSFPQSAPHGVVFLHVTYVPAQEKNFTTAPAICHDGKAHFPREGVFVSNGTHWFVTQRNFYEPQIITTDNTFVSGNCDVVIGIVNNTVYDPLQPELDSFKEELDKYFKNHTSPDVDLGDISGINASVVNIQKEIDRLNEVAKNLNESLIDLQELGKYEQ

SEQ ID NO: 47 - protein, 1208 aa, Artificial Sequence
  Description of Artificial Sequence: Synthetic polypeptide
MFVFLVLLPLVSSQCVNLTTRTQLPPAYTNSFTRGVYYPDKVCRSSVLHSTQDLFLPFFSNVTWFHAIHVSGTNGTKRFDNPVLPFNDGVYFASTEKSNIIRGWIFGTTLDSKTQSLLIVNNATNVVIKVCEFQFCNDPFLGVYYHKNNKSWMESEFRVYSSANNCTFEYVSQPFLMDLEGKQGNFKNLREFVFKNIDGYFKIYSKHTPINLVRDLPQGFSALEPLVDLPIGINITRFQTLLALHRSYLTPGDSSSGWTAGAAAYYVGYLQPRTFLLKYNENGTITDAVDCALDPLSETKCTLKSFTVEKGIYQTSNFRVQPTESIVRFPNITNLCPFGEVFNATRFASVYAWNRKRISNCVADYSVLYNSASFSTFKCYGVSPTKLNDLCFTNVYADSFVIRGDEVRQIAPGQTGKIADYNYKLPDDFTGCVIAWNSNNLDSKVGGNYNYLYRLFRKSNLKPFERDISTEIYQAGSTPCNGVEGFNCYFPLQSYGFQPTNGVGYQPYRVVVLSFELLHAPATVCGPKKSTNLVKNKCVNFNFNGLTGTGVLTESNKKFLPFQQFCRDIADTTDAVRDPQTLEILDITPCSFGGVSVITPGTNTSNQVAVLYQDVNCTEVPVAIHADQLTPTWRVYSTGSNVFQTRAGCLIGAEHVNNSYECDIPIGAGICASYQTQTNSPGSASSVASQSIIAYTMSLGAENSVAYSNNSIAIPTNFTISVTTEILPVSMTKTSVDCTMYICGDSTECSNLLLQYGSFCTQLNRALTGIAVEQDKNTQEVFAQVKQIYKTPPIKDFGGFNFSQILPDPSKPSKRSFIEDLLFNKVTLADAGFIKQYGDCLGDIAARDLICAQKFNGLTVLPPLLTDEMIAQYTSALLAGTITSGWTFGAGAALQIPFAMQMAYRFNGIGVTQNVLYENQKLIANQFNSAIGKIQDSLSSTASALGKLQDVVNQNAQALNTLVKQLSSNFGAISSVLNDILSRLDPPEAEVQIDRLITGRLQSLQTYVTQQLIRAAEIRASANLAATKMSECVLGQSKRVDFCGKGYHLMSFPQSAPHGVVFLHVTYVPAQEKNFTTAPAICHDGKAHFPREGVFVSNGTHWFVTQRNFYEPQIITTDNTFVSGNCDVVIGIVNNTVYDPLQPELDSFKEELDKYFKNHTSPDVDLGDISGINASVVNIQKEIDRLNEVAKNLNESLIDLQELGKYEQ

SEQ ID NO: 48 - protein, 1208 aa, Artificial Sequence
  Description of Artificial Sequence: Synthetic polypeptide
MFVFLVLLPLVSSQCVNLTTRTQLPPAYTNSFTRGVYYPDKVCRSSVLHSTQDLFLPFFSNVTWFHAIHVSGTNGTKRFDNPVLPFNDGVYFASTEKSNIIRGWIFGTTLDSKTQSLLIVNNATNVVIKVCEFQFCNDPFLGVYYHKNNKSWMESEFRVYSSANNCTFEYVSQPFLMDLEGKQGNFKNLREFVFKNIDGYFKIYSKHTPINLVRDLPQGFSALEPLVDLPIGINITRFQTLLALHRSYLTPGDSSSGWTAGAAAYYVGYLQPRTFLLKYNENGTITDAVDCALDPLSETKCTLKSFTVEKGIYQTSNFRVQPTESIVRFPNITNLCPFGEVFNATRFASVYAWNRKRISNCVADYSVLYNSASFSTFKCYGVSPTKLNDLCFTNVYADSFVIRGDEVRQIAPGQTGKIADYNYKLPDDFTGCVIAWNSNNLDSKVGGNYNYLYRLFRKSNLKPFERDISTEIYQAGSTPCNGVEGFNCYFPLQSYGFQPTNGVGYQPYRVVVLSFELLHAPATVCGPKKSTNLVKNKCVNFNFNGLTGTGVLTESNKKFLPFCQFGRDIADTTDAVRDPQTLEILDITPCSFGGVSVITPGTNTSNQVAVLYQDVNCTEVPVAIHADQLTPTWRVYSTGSNVFQTRAGCLIGAEHVNNSYECDIPIGAGICASYQTQTNSPGSASSVASQSIIAYTMSLGAENSVAYSNNSIAIPTNFTISVTTEILPVSMTKTSVDCTMYICGDSTECSNLLLQYGSFCTQLNRALTGIAVEQDKNTQEVFAQVKQIYKTPPIKDFGGFNFSQILPDPSKPSKRSFIEDLLFNKVTLADAGFIKQYGDCLGDIAARDLICAQKFNGLTVLPPLLTDEMIAQYTSALLAGTITSGWTFGAGAALQIPFAMQMAYRFNGIGVTQNVLYENQKLIANQFNSAIGKIQDSLSSTASALGKLQDVVNQNAQALNTLVKQLSSNFGAISSVLNDILSRLDPPEAEVQIDRLITGRLQSLQTYVTQQLIRAAEIRASANLAATKMSECVLGQSKRVDFCGKGYHLMSFPQSAPHGVVFLHVTYVPAQEKNFTTAPAICHDGKAHFPREGVFVSNGTHWFVTQRNFYEPQIITTDNTFVSGNCDVVIGIVNNTVYDPLQPELDSFKEELDKYFKNHTSPDVDLGDISGINASVVNIQKEIDRLNEVAKNLNESLIDLQELGKYEQ

SEQ ID NO: 49 - protein, 1208 aa, Artificial Sequence
  Description of Artificial Sequence: Synthetic polypeptide
MFVFLVLLPLVSSQCVNLTTRTQLPPAYTNSFTRGVYYPDKVFRSSVLHSTQDLFLPFFSNVTWFHAIHVSGTNGTKRFDNPVLPFNDGVYFASTEKSNIIRGWIFGTTLDSKTQSLLIVNNATNVVIKVCEFQFCNDPFLGVYYHKNNKSWMESEFRVYSSANNCTFEYVSQPFLMDLEGKQGNFKNLREFVFKNIDGYFKIYSKHTPINLVRDLPQGFSALEPLVDLPIGINITRFQTLLALHRSYLTPGDSSSGWTAGAAAYYVGYLQPLTFLLKYNENGTITDAVVCALDPLFETKCTLKSFTVEKGIYQTSNFRVQPTESIVRFPNITNLCPFGEVFNATRFASVYAWNRKRISNCVADYSVLYNSASFSTFKCYGVSPTKLNDLCFTNVYADSFVIRGDEVRQIAPGQTGKIADYNYKLPDDFTGCVIAWNSNNLDSKVGGNYNYLYRLFRKSNLKPFERDISTEIYQAGSTPCNGVEGFNCYFPLQSYGFQPTNGVGYQPYRVVVLSFELLHAPATVCGPKKSTNLVKNKCVNFNFNGLTGTGVLTESNKKFLPFQQFGRDIADTTDAVRDPQTLEILDITPCSFGGVSVITPGTNTSNQVAVLYQDVNCTEVPVAIHADQLTPTWRVYSTGSNVFQTRAGCLIGAEHVNNSYECDIPIGAGICASYQTQTNSPGSASSVASQSIIAYTMSLGAENSVAYSNNSIAIPTNFTISVTTEILPVSMTKTSVDCTMYICGDSTECSNLLLQYGSFCTQLNRALTGIAVEQDKNTQEVFAQVKQIYKTPPIKDFGGFNFSQILPDPSKPSKRSFIEDLLFNKVTLADAGFIKQYGDCLGDIAARDLICAQKFNGLTVLPPLLTDEMIAQYTSALLAGTITSGWTFGAGAALQIPFAMQMAYRFNGIGVTQNVLYENQKLIANQFNSAIGKIQDSLSSTASALGKLQDVVNQNAQALNTLVKQLSSNFGAISSVLNDILSRLDPPEAEVQIDRLITGRLQSLQTYVTQQLIRAAEIRASANLAATKMSECVLGQSKRVDFCGKGYHLMSFPQSAPHGVVFLHVTYVPAQEKNFTTAPAICHDGKAHFPREGVFVSNGTHWFVTQRNFYEPQIITTDNTFVSGNCDVVIGIVNNTVYDPLQPELDSFKEELDKYFKNHTSPDVDLGDISGINASVVNIQKEIDRLNEVAKNLNESLIDLQELGKYEQ

SEQ ID NO: 50 - protein, 1208 aa, Artificial Sequence
  Description of Artificial Sequence: Synthetic polypeptide
MFVFLVLLPLVSSQCVNLTTRTQLPPAYTNSFTRGVYYPDKVFRSSVLHSTQDLFLPFFSNVTWFHAIHVSGTNGTKRFDNPVLPFNDGVYFASTEKSNIIRGWIFGTTLDSKTQSLLIVNNATNVVIKVCEFQFCNDPFLGVYYHKNNKSWMESEFRVYSSANNCTFEYVSQPFLMDLEGKQGNFKNLREFVFKNIDGYFKIYSKHTPINLVRDLPQGFSALEPLVDLPIGINITRFQTLLALHRSYLTPGDSSSGWTAGAAAYYVGYLQPITFLLKYNENGTITDAVLCALDPLLETKCTLKSFTVEKGIYQTSNFRVQPTESIVRFPNITNLCPFGEVFNATRFASVYAWNRKRISNCVADYSVLYNSASFSTFKCYGVSPTKLNDLCFTNVYADSFVIRGDEVRQIAPGQTGKIADYNYKLPDDFTGCVIAWNSNNLDSKVGGNYNYLYRLFRKSNLKPFERDISTEIYQAGSTPCNGVEGFNCYFPLQSYGFQPTNGVGYQPYRVVVLSFELLHAPATVCGPKKSTNLVKNKCVNFNFNGLTGTGVLTESNKKFLPFQQFGRDIADTTDAVRDPQTLEILDITPCSFGGVSVITPGTNTSNQVAVLYQDVNCTEVPVAIHADQLTPTWRVYSTGSNVFQTRAGCLIGAEHVNNSYECDIPIGAGICASYQTQTNSPGSASSVASQSIIAYTMSLGAENSVAYSNNSIAIPTNFTISVTTEILPVSMTKTSVDCTMYICGDSTECSNLLLQYGSFCTQLNRALTGIAVEQDKNTQEVFAQVKQIYKTPPIKDFGGFNFSQILPDPSKPSKRSFIEDLLFNKVTLADAGFIKQYGDCLGDIAARDLICAQKFNGLTVLPPLLTDEMIAQYTSALLAGTITSGWTFGAGAALQIPFAMQMAYRFNGIGVTQNVLYENQKLIANQFNSAIGKIQDSLSSTASALGKLQDVVNQNAQALNTLVKQLSSNFGAISSVLNDILSRLDPPEAEVQIDRLITGRLQSLQTYVTQQLIRAAEIRASANLAATKMSECVLGQSKRVDFCGKGYHLMSFPQSAPHGVVFLHVTYVPAQEKNFTTAPAICHDGKAHFPREGVFVSNGTHWFVTQRNFYEPQIITTDNTFVSGNCDVVIGIVNNTVYDPLQPELDSFKEELDKYFKNHTSPDVDLGDISGINASVVNIQKEIDRLNEVAKNLNESLIDLQELGKYEQ

SEQ ID NO: 51 - protein, 1208 aa, Artificial Sequence
  Description of Artificial Sequence: Synthetic polypeptide
MFVFLVLLPLVSSQCVNLTTRTQLPPAYTNSFTRGVYYPDKVFRSSVLHSTQDLFLPFFSNVTWFHAIHVSGTNGTKRFDNPVLPFNDGVYFASTEKSNIIRGWIFGTTLDSKTQSLLIVNNATNVVIKVCEFQFCNDPFLGVYYHKNNKSWMESEFRVYSSANNCTFEYVSQPFLMDLEGKQGNFKNLREFVFKNIDGYFKIYSKHTPINLVRDLPQGFSALEPLVDLPIGINITRFQTLLALHRSYLTPGDSSSGWTAGAAAYYVGYLQPITFLLKYNENGTITDAVLCALDPLSETKCTLKSFTVEKGIYQTSNFRVQPTESIVRFPNITNLCPFGEVFNATRFASVYAWNRKRISNCVADYSVLYNSASFSTFKCYGVSPTKLNDLCFTNVYADSFVIRGDEVRQIAPGQTGKIADYNYKLPDDFTGCVIAWNSNNLDSKVGGNYNYLYRLFRKSNLKPFERDISTEIYQAGSTPCNGVEGFNCYFPLQSYGFQPTNGVGYQPYRVVVLSFELLHAPATVCGPKKSTNLVKNKCVNFNFNGLTGTGVLTESNKKFLPFQQFGRDIADTTDAVRDPQTLEILDITPCSFGGVSVITPGTNTSNQVAVLYQDVNCTEVPVAIHADQLTPTWRVYSTGSNVFQTRAGCLIGAEHVNNSYECDIPIGAGICASYQTQTNSPGSASSVASQSIIAYTMSLGAENSVAYSNNSIAIPTNFTISVTTEILPVSMTKTSVDCTMYICGDSTECSNLLLQYGSFCTQLNRALTGIAVEQDKNTQEVFAQVKQIYKTPPIKDFGGFNFSQILPDPSKPSKRSFIEDLLFNKVTLADAGFIKQYGDCLGDIAARDLICAQKFNGLTVLPPLLTDEMIAQYTSALLAGTITSGWTFGAGAALQIPFAMQMAYRFNGIGVTQNVLYENQKLIANQFNSAIGKIQDSLSSTASALGKLQDVVNQNAQALNTLVKQLSSNFGAISSVLNDILSRLDPPEAEVQIDRLITGRLQSLQTYVTQQLIRAAEIRASANLAATKMSECVLGQSKRVDFCGKGYHLMSFPQSAPHGVVFLHVTYVPAQEKNFTTAPAICHDGKAHFPREGVFVSNGTHWFVTQRNFYEPQIITTDNTFVSGNCDVVIGIVNNTVYDPLQPELDSFKEELDKYFKNHTSPDVDLGDISGINASVVNIQKEIDRLNEVAKNLNESLIDLQELGKYEQ

SEQ ID NO: 52 - protein, 1208 aa, Artificial Sequence
  Description of Artificial Sequence: Synthetic polypeptide
MFVFLVLLPLVSSQCVNLTTRTQLPPAYTNSFTRGVYYPDKVFRSSVLHSTQDLFLPFFSNVTWFHAIHVSGTNGTKRFDNPVLPFNDGVYFASTEKSNIIRGWIFGTTLDSKTQSLLIVNNATNVVIKVCEFQFCNDPFLGVYYHKNNKSWMESEFRVYSSANNCTFEYVSQPFLMDLEGKQGNFKNLREFVFKNIDGYFKIYSKHTPINLVRDLPQGFSALEPLVDLPIGINITRFQTLLALHRSYLTPGDSSSGWTAGAAAYYVGYLQPRTFLLKYNENGTITDAVDCALDPLFETKCTLKSFTVEKGIYQTSNFRVQPTESIVRFPNITNLCPFGEVFNATRFASVYAWNRKRISNCVADYSVLYNSASFSTFKCYGVSPTKLNDLCFTNVYADSFVIRGDEVRQIAPGQTGKIADYNYKLPDDFTGCVIAWNSNNLDSKVGGNYNYLYRLFRKSNLKPFERDISTEIYQAGSTPCNGVEGFNCYFPLQSYGFQPTNGVGYQPYRVVVLSFELLHAPATVCGPKKSTNLVKNKCVNFNFNGLTGTGVLTESNKKFLPFQQFGRDIADTTDAVRDPQTLEILDITPCSFGGVSVITPGTNTSNQVAVLYQDVNCTEVPVAIHADQLTPTWRVYSTGSNVFQTRAGCLIGAEHVNNSYECDIPIGAGICASYQTQTNSPGSASSVASQSIIAYTMSLGAENSVAYSNNSIAIPTNFTISVTTEILPVSMTKTSVDCTMYICGDSTECSNLLLQYGSFCTQLNRALTGIAVEQDKNTQEVFAQVKQIYKTPPIKDFGGFNFSQILPDPSKPSKRSFIEDLLFNKVTLADAGFIKQYGDCLGDIAARDLICAQKFNGLTVLPPLLTDEMIAQYTSALLAGTITSGWTFGAGAALQIPFAMQMAYRFNGIGVTQNVLYENQKLIANQFNSAIGKIQDSLSSTASALGKLQDVVNQNAQALNTLVKQLSSNFGAISSVLNDILSRLDPPEAEVQIDRLITGRLQSLQTYVTQQLIRAAEIRASANLAATKMSECVLGQSKRVDFCGKGYHLMSFPQSAPHGVVFLHVTYVPAQEKNFTTAPAICHDGKAHFPREGVFVSNGTHWFVTQRNFYEPQIITTDNTFVSGNCDVVIGIVNNTVYDPLQPELDSFKEELDKYFKNHTSPDVDLGDISGINASVVNIQKEIDRLNEVAKNLNESLIDLQELGKYEQ

SEQ ID NO: 53 - protein, 1208 aa, Artificial Sequence
  Description of Artificial Sequence: Synthetic polypeptide
MFVFLVLLPLVSSQCVNLTTRTQLPPAYTNSFTRGVYYPDKVFRSSVLHSTQDLFLPFFSNVTWFHAIHVSGTNGTKRFDNPVLPFNDGVYFASTEKSNIIRGWIFGTTLDSKTQSLLIVNNATNVVIKVCEFQFCNDPFLGVYYHKNNKSWMESEFRVYSSANNCTFEYVSQPFLMDLEGKQGNFKNLREFVFKNIDGYFKIYSKHTPINLVRDLPQGFSALEPLVDLPIGINITRFQTLLALHRSYLTPGDSSSGWTAGAAAYYVGYLQPRTFLLKYNENGTITDAVDCALDPLSETKCTLKSFTVEKGIYQTLNFRVQPTESIVRFPNITNLCPFGEVFNATRFASVYAWNRKRISNCVADYSVLYNSASFSTFKCYGVSPTKLNDLCFTNVYADSFVIRGDEVRQIAPGQTGKIADYNYKLPDDFTGCVIAWNSNNLDSKVGGNYNYLYRLFRKSNLKPFERDISTEIYQAGSTPCNGVEGFNCYFPLQSYGFQPTNGVGYQPYRVVVLSFELLHAPATVCGPKKSTNLVKNKCVNFNFNGLTGTGVLTESNKKFLPFQQFGRDIADTTDAVRDPQTLEILDITPCSFGIVSVITPGTNTSNQVAVLYQDVNCTEVPVAIHADQLTPTWRVYSTGSNVFQTRAGCLIGAEHVNNSYECDIPIGAGICASYQTQTNSPGSASSVASQSIIAYTMSLGAENSVAYSNNSIAIPTNFTISVTTEILPVSMTKTSVICIMYICGDSTECSNLLLQYGSFCTQLNRALTGIAVEQDKNTQEVFAQVKQIYKTPPIKDFGGFNFSQILPDPSKPSKRSFIEDLLFNKVTLADAGFIKQYGDCLGDIAARDLICAQKFNGLTVLPPLLTDEMIAQYTSALLAGTITSGWTFGAGAALQIPFAMQMAYRFNGIGVTQNVLYENQKLIANQFNSAIGKIQDSLSSTASALGKLQDVVNQNAQALNTLVKQLSSNFGAISSVLNDILSRLDPPEAEVQIDRLITGRLQSLQTYVTQQLIRAAEIRASANLAATKMSECVLGQSKRVDFCGKGYHLMSFPQSAPHGVVFLHVTYVPAQEKNFTTAPAICHDGKAHFPREGVFVSNGTHWFVTQRNFYEPQIITTDNTFVSGNCDVVIGIVNNTVYDPLQPELDSFKEELDKYFKNHTSPDVDLGDISGINASVVNIQKEIDRLNEVAKNLNESLIDLQELGKYEQ

SEQ ID NO: 54 - protein, 1208 aa, Artificial Sequence
  Description of Artificial Sequence: Synthetic polypeptide
MFVFLVLLPLVSSQCVNLTTRTQLPPAYTNSFTRGVYYPDKVFRSSVLHSTQDLFLPFFSNVTWFHAIHVSGTNGTKRFDNPVLPFNDGVYFASTEKSNIIRGWIFGTTLDSKTQSLLIVNNATNVVIKVCEFQFCNDPFLGVYYHKNNKSWMESEFRVYSSANNCTFEYVSQPFLMDLEGKQGNFKNLREFVFKNIDGYFKIYSKHTPINLVRDLPQGFSALEPLVDLPIGINITRFQTLLALHRSYLTPGDSSSGWTAGAAAYYVGYLQPRTFLLKYNENGTITDAVDCALDPLSETKCTLKSFTVEKGIYQTLNFRVQPTESIVRFPNITNLCPFGEVFNATRFASVYAWNRKRISNCVADYSVLYNSASFSTFKCYGVSPTKLNDLCFTNVYADSFVIRGDEVRQIAPGQTGKIADYNYKLPDDFTGCVIAWNSNNLDSKVGGNYNYLYRLFRKSNLKPFERDISTEIYQAGSTPCNGVEGFNCYFPLQSYGFQPTNGVGYQPYRVVVLSFELLHAPATVCGPKKSTNLVKNKCVNFNFNGLTGTGVLTESNKKFLPFQQFGRDIADTTDAVRDPQTLEILDITPCSFGIVSVITPGTNTSNQVAVLYQDVNCTEVPVAIHADQLTPTWRVYSTGSNVFQTRAGCLIGAEHVNNSYECDIPIGAGICASYQTQTNSPGSASSVASQSIIAYTMSLGAENSVAYSNNSIAIPTNFTISVTTEILPVSMTKTSVICFMYICGDSTECSNLLLQYGSFCTQLNRALTGIAVEQDKNTQEVFAQVKQIYKTPPIKDFGGFNFSQILPDPSKPSKRSFIEDLLFNKVTLADAGFIKQYGDCLGDIAARDLICAQKFNGLTVLPPLLTDEMIAQYTSALLAGTITSGWTFGAGAALQIPFAMQMAYRFNGIGVTQNVLYENQKLIANQFNSAIGKIQDSLSSTASALGKLQDVVNQNAQALNTLVKQLSSNFGAISSVLNDILSRLDPPEAEVQIDRLITGRLQSLQTYVTQQLIRAAEIRASANLAATKMSECVLGQSKRVDFCGKGYHLMSFPQSAPHGVVFLHVTYVPAQEKNFTTAPAICHDGKAHFPREGVFVSNGTHWFVTQRNFYEPQIITTDNTFVSGNCDVVIGIVNNTVYDPLQPELDSFKEELDKYFKNHTSPDVDLGDISGINASVVNIQKEIDRLNEVAKNLNESLIDLQELGKYEQ

SEQ ID NO: 55 - protein, 1208 aa, Artificial Sequence
  Description of Artificial Sequence: Synthetic polypeptide
MFVFLVLLPLVSSQCVNLTTRTQLPPAYTNSFTRGVYYPDKVFRSSVLHSTQDLFLPFFSNVTWFHAIHVSGTNGTKRFDNPVLPFNDGVYFASTEKSNIIRGWIFGTTLDSKTQSLLIVNNATNVVIKVCEFQFCNDPFLGVYYHKNNKSWMESEFRVYSSANNCTFEYVSQPFLMDLEGKQGNFKNLREFVFKNIDGYFKIYSKHTPINLVRDLPQGFSALEPLVDLPIGINITRFQTLLALHRSYLTPGDSSSGWTAGAAAYYVGYLQPRTFLLKYNENGTITDAVDCALDPLSETKCTLKSFTVEKGIYQTLNFRVQPTESIVRFPNITNLCPFGEVFNATRFASVYAWNRKRISNCVADYSVLYNSASFSTFKCYGVSPTKLNDLCFTNVYADSFVIRGDEVRQIAPGQTGKIADYNYKLPDDFTGCVIAWNSNNLDSKVGGNYNYLYRLFRKSNLKPFERDISTEIYQAGSTPCNGVEGFNCYFPLQSYGFQPTNGVGYQPYRVVVLSFELLHAPATVCGPKKSTNLVKNKCVNFNFNGLTGTGVLTESNKKFLPFQQFGRDIADTTDAVRDPQTLEILDITPCSFGIVSVITPGTNTSNQVAVLYQDVNCTEVPVAIHADQLTPTWRVYSTGSNVFQTRAGCLIGAEHVNNSYECDIPIGAGICASYQTQTNSPGSASSVASQSIIAYTMSLGAENSVAYSNNSIAIPTNFTISVTTEILPVSMTKTSVICTMYICGDSTECSNLLLQYGSFCTQLNRALTGIAVEQDKNTQEVFAQVKQIYKTPPIKDFGGFNFSQILPDPSKPSKRSFIEDLLFNKVTLADAGFIKQYGDCLGDIAARDLICAQKFNGLTVLPPLLTDEMIAQYTSALLAGTITSGWTFGAGAALQIPFAMQMAYRFNGIGVTQNVLYENQKLIANQFNSAIGKIQDSLSSTASALGKLQDVVNQNAQALNTLVKQLSSNFGAISSVLNDILSRLDPPEAEVQIDRLITGRLQSLQTYVTQQLIRAAEIRASANLAATKMSECVLGQSKRVDFCGKGYHLMSFPQSAPHGVVFLHVTYVPAQEKNFTTAPAICHDGKAHFPREGVFVSNGTHWFVTQRNFYEPQIITTDNTFVSGNCDVVIGIVNNTVYDPLQPELDSFKEELDKYFKNHTSPDVDLGDISGINASVVNIQKEIDRLNEVAKNLNESLIDLQELGKYEQ

SEQ ID NO: 56 - protein, 1208 aa, Artificial Sequence
  Description of Artificial Sequence: Synthetic polypeptide
MFVFLVLLPLVSSQCVNLTTRTQLPPAYTNSFTRGVYYPDKVFRSSVLHSTQDLFLPFFSNVTWFHAIHVSGTNGTKRFDNPVLPFNDGVYFASTEKSNIIRGWIFGTTLDSKTQSLLIVNNATNVVIKVCEFQFCNDPFLGVYYHKNNKSWMESEFRVYSSANNCTFEYVSQPFLMDLEGKQGNFKNLREFVFKNIDGYFKIYSKHTPINLVRDLPQGFSALEPLVDLPIGINITRFQTLLALHRSYLTPGDSSSGWTAGAAAYYVGYLQPRTFLLKYNENGTITDAVDCALDPLSETKCTLKSFTVEKGIYQTSNFRVQPTESIVRFPNITNLCPFGEVFNATRFASVYAWNRKRISNCVADYSVLYNSASFSTFKCYGVSPTKLNDLCFTNVYADSFVIRGDEVRQIAPGQTGKIADYNYKLPDDFTGCVIAWNSNNLDSKVGGNYNYLYRLFRKSNLKPFERDISTEIYQAGSTPCNGVEGFNCYFPLQSYGFQPTNGVGYQPYRVVVLSFELLHAPATVCGPKKSTNLVKNKCVNFNFNGLTGTGVLTESNKKFLPFQQFGRDIADTTDAVRDPQTLEILDITPCSFGGVSVITPGTNTSNQVAVLYQDVNCTEVPVAIHADQLTPTWRVYSTGSNVFQTRAGCLIGAEHVNNSYECDIPIGACICASYQTQTNSPGSASSVASQSIIAYTMSLGAENSVAYSNNSIAIPTNFTISVTTEILPVSMTKTSVDCTMYICGDSTECSNLLLQYGSFCTQLNRALTGIAVEQDKNTQEVFAQVKQIYKTPPIKDFGGFNFSQILPDPSKPSKRSFIEDLLFNKVTLADAGFIKQYGDCLGDIAARDLICAQKFNGLTVLPPLLCDEMIAQYTSALLAGTITSGWTFGAGAALQIPFAMQMAYRFNGIGVTQNVLYENQKLIANQFNSAIGKIQDSLSSTASALGKLQDVVNQNAQALNTLVKQLSSNFGAISSVLNDILSRLDPPEAEVQIDRLITGRLQSLQTYVTQQLIRAAEIRASANLAATKMSECVLGQSKRVDFCGKGYHLMSFPQSAPHGVVFLHVTYVPAQEKNFTTAPAICHDGKAHFPREGVFVSNGTHWFVTQRNFYEPQIITTDNTFVSGNCDVVIGIVNNTVYDPLQPELDSFKEELDKYFKNHTSPDVDLGDISGINASVVNIQKEIDRLNEVAKNLNESLIDLQELGKYEQ

SEQ ID NO: 57 - protein, 1208 aa, Artificial Sequence; identical to SEQ ID NO: 56
  Description of Artificial Sequence: Synthetic polypeptide

SEQ ID NO: 58 - protein, 1208 aa, Artificial Sequence
  Description of Artificial Sequence: Synthetic polypeptide
MFVFLVLLPLVSSQCVNLTTRTQLPPAYTNSFTRGVYYPDKVFRSSVLHSTQDLFLPFFSNVTWFHAIHVSGTNGTKRFDNPVLPFNDGVYFASTEKSNIIRGWIFGTTLDSKTQSLLIVNNATNVVIKVCEFQFCNDPFLGVYYHKNNKSWMESEFRVYSSANNCTFEYVSQPFLMDLEGKQGNFKNLREFVFKNIDGYFKIYSKHTPINLVRDLPQGFSALEPLVDLPIGINITRFQTLLALHRSYLTPGDSSSGWTAGAAAYYVGYLQPRTFLLKYNENGTITDAVDCALDPLSETKCTLKSFTVEKGIYCTSNFRVQPTESIVRFPNITNLCPFGEVFNATRFASVYAWNRKRISNCVADYSVLYNSASFSTFKCYGVSPTKLNDLCFTNVYADSFVIRGDEVRQIAPGQTGKIADYNYKLPDDFTGCVIAWNSNNLDSKVGGNYNYLYRLFRKSNLKPFERDISTEIYQAGSTPCNGVEGFNCYFPLQSYGFQPTNGVGYQPYRVVVLSFELLHAPATVCGPKKSTNLVKNKCVNFNFNGLTGTGVLTESNKKFLPFQQFGRDIADTTDAVRDPQTLEILDITPCSFGGVSVITPGTNTSNQVAVLYQDVNCTEVPVAIHADQLTPTWRVYSTGSNVFQTRAGCLIGAEHVNNSYECDIPIGAGICASYQTQTNSPGSASSVASQSIIAYTMSLGAENSVAYSNNSIAIPTNFTISVTTEILPVSMTKTCVDCTMYICGDSTECSNLLLQYGSFCTQLNRALTGIAVEQDKNTQEVFAQVKQIYKTPPIKDFGGFNFSQILPDPSKPSKRSFIEDLLFNKVTLADAGFIKQYGDCLGDIAARDLICAQKFNGLTVLPPLLTDEMIAQYTSALLAGTITSGWTFGAGAALQIPFAMQMAYRFNGIGVTQNVLYENQKLIANQFNSAIGKIQDSLSSTASALGKLQDVVNQNAQALNTLVKQLSSNFGAISSVLNDILSRLDPPEAEVQIDRLITGRLQSLQTYVTQQLIRAAEIRASANLAATKMSECVLGQSKRVDFCGKGYHLMSFPQSAPHGVVFLHVTYVPAQEKNFTTAPAICHDGKAHFPREGVFVSNGTHWFVTQRNFYEPQIITTDNTFVSGNCDVVIGIVNNTVYDPLQPELDSFKEELDKYFKNHTSPDVDLGDISGINASVVNIQKEIDRLNEVAKNLNESLIDLQELGKYEQ

SEQ ID NO: 59 - protein, 1208 aa, Artificial Sequence
  Description of Artificial Sequence: Synthetic polypeptide
MFVFLVLLPLVSSQCVNLTTRTQLPPAYTNSFTRGVYYPDKVFRSSVLHSTQDLFLPFFSNVTWFHAIHVSGTNGTKRFDNPVLPFNDGVYFASTEKSNIIRGWIFGTTLDSKTQSLLIVNNATNVVIKVCEFQFCNDPFLGVYYHKNNKSWMESEFRVYSSANNCTFEYVSQPFLMDLEGKQGNFKNLREFVFKNIDGYFKIYSKHTPINLVRDLPQGFSALEPLVDLPIGINITRFQTLLALHRSYLTPGDSSSGWTAGAAAYYVGYLQPRTFLLKYNENGTITDAVDCALDPLSETKCTLKSFTVEKGIYQTSNFRVQPTESIVRFPNITNLCPFGEVFNATRFASVYAWNRKRISNCVADYSVLYNSASFSTFKCYGVSPTKLNDLCFTNVYADSFVIRGDEVRQIAPGQTGKIADYNYKLPDDFTGCVIAWNSNNLDSKVGGNYNYLYRLFRKSNLKPFERDISTEIYQAGSTPCNGVEGFNCYFPLQSYGFQPTNGVGYQPYRVVVLSFELLHAPATVCGPKKSTNLVKNKCVNFNFNGLTGTGVLTESNKKFLPFQQFGRDIADTTDAVRDPQTLEILDITPCSFGGVSVITPGTNTSNQVAVLYQDVNCTEVPVAIHADQLTPTWRVYSTGSNVFQTRAGCLIGAEHVNNSYECDIPIGCGICASYQTQTNSPGSASSVASQSIIAYTMSLGAENSVAYSNNSIAIPTNFTISVTTEILPVSMTKTSVDCTMYICGDSTECSNLLLQYGSFCTQLNRALTGIAVEQDKNTQEVFAQVKQIYKTPPIKDFGGFNFSQILPDPSKPSKRSFIEDLLFNKVTLADAGFIKQYGDCLGDIAARDLICAQKFNGLTVLPPLLCDEMIAQYTSALLAGTITSGWTFGAGAALQIPFAMQMAYRFNGIGVTQNVLYENQKLIANQFNSAIGKIQDSLSSTASALGKLQDVVNQNAQALNTLVKQLSSNFGAISSVLNDILSRLDPPEAEVQIDRLITGRLQSLQTYVTQQLIRAAEIRASANLAATKMSECVLGQSKRVDFCGKGYHLMSFPQSAPHGVVFLHVTYVPAQEKNFTTAPAICHDGKAHFPREGVFVSNGTHWFVTQRNFYEPQIITTDNTFVSGNCDVVIGIVNNTVYDPLQPELDSFKEELDKYFKNHTSPDVDLGDISGINASVVNIQKEIDRLNEVAKNLNESLIDLQELGKYEQ

SEQ ID NO: 60 - protein, 1208 aa, Artificial Sequence
  Description of Artificial Sequence: Synthetic polypeptide
MFVFLVLLPLVSSQCVNLTTRTQLPPAYTNSFTRGVYYPDKVFRSSVLHSTQDLFLPFFSNVTWFHAIHVSGTNGTKRFDNPVLPFNDGVYFASTEKSNIIRGWIFGTTLDSKTQSLLIVNNATNVVIKVCEFQFCNDPFLGVYYHKNNKSWMESEFRVYSSANNCTFEYVSQPFLMDLEGKQGNFKNLREFVFKNIDGYFKIYSKHTPINLVRDLPQGFSALEPLVDLPIGINITRFQTLLALHRSYLTPGDSSSGWTAGAAAYYVGYLQPRTFLLKYNENGTITDAVDCALDPLSETKCTLKSFTVEKGIYQTSNFRVQPTESIVRFPNITNLCPFGEVFNATRFASVYAWNRKRISNCVADYSVLYNSASFSTFKCYGVSPTKLNDLCFTNVYADSFVIRGDEVRQIAPGQTGKIADYNYKLPDDFTGCVIAWNSNNLDSKVGGNYNYLYRLFRKSNLKPFERDISTEIYQAGSTPCNGVEGFNCYFPLQSYGFQPTNGVGYQPYRVVVLSFELLHAPATVCGPKKSTNLVKNKCVNFNFNGLTGTGVLTESNKKFLPFQQFGRDIADTTDAVRDPQTLEILDITPCSFGGVSVITPGTNTSNQVAVLYQDVNCTEVPVAIHADQLTPTWRVYSTGSNVFQTRAGCLIGAEHVNNSYECDIPIGAGICASYQTQTNSPGSASSVASQSIIAYTMSLGAENSVAYSNNSIAIPTNFTISVTTEILPVSMTKTSVDCTMYICGDSTECSNLLLQYGSFCTQLNRALTGIAVEQDKNTQEVFAQVKQIYKTPPIKDFGGFNFSQILPDPSKPSKRSFIEDLLFNKVTLADAGFIKQYGDCLGDIAARDLICAQKFNGLTVLPPLLTDEMIAQYTSALLAGTITSGWTFGAGAALQIPFAMQMAYRFLGIGVTINVLYENQKLIANQFNSAIGKIQDSLSSTASALGKLQDVVNQNAQALNTLVKQLSSNFGAISSVLNDILSRLDPPEAEVQIDRLITGRLQSLQTYVTQQLIRAAEIRASANLAATKMSECVLGQSKRVDFCGKGYHLMSFPQSAPHGVVFLHVTYVPAQEKNFTTAPAICHDGKAHFPRIGVFVSNGTHWFVTQRNFYEPQIITTDNTFVSGNCDVVIGIVNNTVYDPLQPELDSFKEELDKYFKNHTSPDVDLGDISGINASVVNIQKEIDRLNEVAKNLNESLIDLQELGKYEQ

SEQ ID NO: 61 - protein, 1208 aa, Artificial Sequence
  Description of Artificial Sequence: Synthetic polypeptide
MFVFLVLLPLVSSQCVNLTTRTQLPPAYTNSFTRGVYYPDKVFRSSVLHSTQDLFLPFFSNVTWFHAIHVSGTNGTKRFDNPVLPFNDGVYFASTEKSNIIRGWIFGTTLDSKTQSLLIVNNATNVVIKVCEFQFCNDPFLGVYYHKNNKSWMESEFRVYSSANNCTFEYVSQPFLMDLEGKQGNFKNLREFVFKNIDGYFKIYSKHTPINLVRDLPQGFSALEPLVDLPIGINITRFQTLLALHRSYLTPGDSSSGWTAGAAAYYVGYLQPRTFLLKYNENGTITDAVDCALDPLSETKCTLKSFTVEKGIYQTSNFRVQPTESIVRFPNITNLCPFGEVFNATRFASVYAWNRKRISNCVADYSVLYNSASFSTFKCYGVSPTKLNDLCFTNVYADSFVIRGDEVRQIAPGQTGKIADYNYKLPDDFTGCVIAWNSNNLDSKVGGNYNYLYRLFRKSNLKPFERDISTEIYQAGSTPCNGVEGFNCYFPLQSYGFQPTNGVGYQPYRVVVLSFELLHAPATVCGPKKSTNLVKNKCVNFNFNGLTGTGVLTESNKKFLPFQQFGRDIADTTDAVRDPQTLEILDITPCSFGGVSVITPGTNTSNQVAVLYQDVNCTEVPVAIHADQLTPTWRVYSTGSNVFQTRAGCLIGAEHVNNSYECDIPIGAGICASYQTQTNSPGSASSVASQSIIAYTMSLGAENSVAYSNNSIAIPTNFTISVTTEILPVSMTKTSVDCTMYICGDSTECSNLLLQYGSFCTQLNRALTGIAVEQDKNTQEVFAQVKQIYKTPPIKDFGGFNFSQILPDPSKPSKRSFIEDLLFNKVTLADAGFIKQYGDCLGDIAARDLICAQKFNGLTVLPPLLTDEMIAQYTSALLAGTITSGWTFGAGAALQIPFAMQMAYRFLGIGVTYNVLYENQKLIANQFNSAIGKIQDSLSSTASALGKLQDVVNQNAQALNTLVKQLSSNFGAISSVLNDILSRLDPPEAEVQIDRLITGRLQSLQTYVTQQLIRAAEIRASANLAATKMSECVLGQSKRVDFCGKGYHLMSFPQSAPHGVVFLHVTYVPAQEKNFTTAPAICHDGKAHFPREGVFVSNGTHWFVTQRNFYEPQIITTDNTFVSGNCDVVIGIVNNTVYDPLQPELDSFKEELDKYFKNHTSPDVDLGDISGINASVVNIQKEIDRLNEVAKNLNESLIDLQELGKYEQ

SEQ ID NO: 62 - protein, 1208 aa, Artificial Sequence
  Description of Artificial Sequence: Synthetic polypeptide
MFVFLVLLPLVSSQCVNLTTRTQLPPAYTNSFTRGVYYPDKVFRSSVLHSTQDLFLPFFSNVTWFHAIHVSGTNGTKRFDNPVLPFNDGVYFASTEKSNIIRGWIFGTTLDSKTQSLLIVNNATNVVIKVCEFQFCNDPFLGVYYHKNNKSWMESEFRVYSSANNCTFEYVSQPFLMDLEGKQGNFKNLREFVFKNIDGYFKIYSKHTPINLVRDLPQGFSALEPLVDLPIGINITRFQTLLALHRSYLTPGDSSSGWTAGAAAYYVGYLQPRTFLLKYNENGTITDAVDCALDPLSETKCTLKSFTVEKGIYQTSNFRVQPTESIVRFPNITNLCPFGEVFNATRFASVYAWNRKRISNCVADYSVLYNSASFSTFKCYGVSPTKLNDLCFTNVYADSFVIRGDEVRQIAPGQTGKIADYNYKLPDDFTGCVIAWNSNNLDSKVGGNYNYLYRLFRKSNLKPFERDISTEIYQAGSTPCNGVEGFNCYFPLQSYGFQPTNGVGYQPYRVVVLSFELLHAPATVCGPKKSTNLVKNKCVNFNFNGLTGTGVLTESNKKFLPFQQFGRDIADTTDAVRDPQTLEILDITPCSFGGVSVITPGTNTSNQVAVLYQDVNCTEVPVAIHADQLTPTWRVYSTGSNVFQTRAGCLIGAEHVNNSYECDIPIGAGICASYQTQTNSPGSASSVASQSIIAYTMSLGAENSVAYSNNSIAIPTNFTISVTTEILPVSMTKTSVDCTMYICGDSTECSNLLLQYGSFCTQLNRALTGIAVEQDKNTQEVFAQVKQIYKTPPIKDFGGFNFSQILPDPSKPSKRSFIEDLLFNKVTLADAGFIKQYGDCLGDIAARDLICAQKFNGLTVLPPLLTDEMIAQYTSALLAGTITSGWTFGAGAALQIPFAMQMAYRFLGIGVTINVLYENQKLIANQFNSAIGKIQDSLSSTASALGKLQDVVNQNAQALNTLVKQLSSNFGAISSVLNDILSRLDPPEAEVQIDRLITGRLQSLQTYVTQQLIRAAEIRASANLAATKMSECVLGQSKRVDFCGKGYHLMSFPQSAPHGVVFLHVTYVPAQEKNFTTAPAICHDGKAHFPRFGVFVSNGTHWFVTQRNFYEPQIITTDNTFVSGNCDVVIGIVNNTVYDPLQPELDSFKEELDKYFKNHTSPDVDLGDISGINASVVNIQKEIDRLNEVAKNLNESLIDLQELGKYEQ

SEQ ID NO: 63 - protein, 1208 aa, Artificial Sequence
  Description of Artificial Sequence: Synthetic polypeptide
MFVFLVLLPLVSSQCVNLTTRTQLPPAYTNSFTRGVYYPDKVFRSSVLHSTQDLFLPFFSNVTWFHAIHVSGTNGTKRFDNPVLPFNDGVYFASTEKSNIIRGWIFGTTLDSKTQSLLIVNNATNVVIKVCEFQFCNDPFLGVYYHKNNKSWMESEFRVYSSANNCTFEYVSQPFLMDLEGKQGNFKNLREFVFKNIDGYFKIYSKHTPINLVRDLPQGFSALEPLVDLPIGINITRFQTLLALHRSYLTPGDSSSGWTAGAAAYYVGYLQPRTFLLKYNENGTITDAVDCALDPLSETKCTLKSFTVEKGIYQTSNFRVQPTESIVRFPNITNLCPFGEVFNATRFASVYAWNRKRISNCVADYSVLYNSASFSTFKCYGVSPTKLNDLCFTNVYADSFVIRGDEVRQIAPGQTGKIADYNYKLPDDFTGCVIAWNSNNLDSKVGGNYNYLYRLFRKSNLKPFERDISTEIYQAGSTPCNGVEGFNCYFPLQSYGFQPTNGVGYQPYRVVVLSFELLHAPATVCGPKKSTNLVKNKCVNFNFNGLTGTGVLTESNKKFLPFQQFGRDIADTTDAVRDPQTLEILDITPCSFGGVSVITPGTNTSNQVAVLYQDVNCTEVPVAIHADQLTPTWRVYSTGSNVFQTRAGCLIGAEHVNNSYECDIPIGAGICASYQTQTNSPGSASSVASQSIIAYTMSLGAENSVAYSNNSIAIPTNFTISVTTEILPVSMTKTSVDCTMYICGDSTECSNLLLQYGSFCTQLNRALTGIAVEQDKNTQEVFAQVKQIYKTPPIKDFGGFNFSQILPDPSKPSKRSFIEDLLFNKVTLADAGFIKQYGDCLGDIAARDLICAQKFNGLTVLPPLLTDEMIAQYTSALLAGTITSGWTFGAGAALQIPFAMQMAYRFLGIGVTINVLYENQKLIANQFNSAIGKIQDSLSSTASALGKLQDVVNQNAQALNTLVKQLSSNFGAISSVLNDILSRLDPPEAEVQIDRLITGRLQSLQTYVTQQLIRAAEIRASANLAATKMSECVLGQSKRVDFCGKGYHLMSFPQSAPHGVVFLHVTYVPAQEKNFTTAPAICHDGKAHFPREGVFVSNGTHWFVTQRNFYEPQIITTDNTFVSGNCDVVIGIVNNTVYDPLQPELDSFKEELDKYFKNHTSPDVDLGDISGINASVVNIQKEIDRLNEVAKNLNESLIDLQELGKYEQ

SEQ ID NO: 64 - protein, 1208 aa, Artificial Sequence
  Description of Artificial Sequence: Synthetic polypeptide
MFVFLVLLPLVSSQCVNLTTRTQLPPAYTNSFTRGVYYPDKVFRSSVLHSTQDLFLPFFSNVTWFHAIHVSGTNGTKRFDNPVLPFNDGVYFASTEKSNIIRGWIFGTTLDSKTQSLLIVNNATNVVIKVCEFQFCNDPFLGVYYHKNNKSWMESEFRVYSSANNCTFEYVSQPFLMDLEGKQGNFKNLREFVFKNIDGYFKIYSKHTPINLVRDLPQGFSALEPLVDLPIGINITRFQTLLALHRSYLTPGDSSSGWTAGAAAYYVGYLQPRTFLLKYNENGTITDAVDCALDPLSETKCTLKSFTVEKGIYQTSNFRVQPTESIVRFPNITNLCPFGEVFNATRFASVYAWNRKRISNCVADYSVLYNSASFSTFKCYGVSPTKLNDLCFTNVYADSFVIRGDEVRQIAPGQTGKIADYNYKLPDDFTGCVIAWNSNNLDSKVGGNYNYLYRLFRKSNLKPFERDISTEIYQAGSTPCNGVEGFNCYFPLQSYGFQPTNGVGYQPYRVVVLSFELLHAPATVCGPKKSTNLVKNKCVNFNFNGLTGTGVLTESNKKFLPFQQFGRDIADTTDAVRDPQTLEILDITPCSFGGVSVITPGTNTSNQVAVLYQDVNCTEVPVAIHADQLTPTWRVYSTGSNVFQTRAGCLIGAEHVNNSYECDIPIGAGICASYQTQTNSPGSASSVASQSIIAYTMSLGAENSVAYSNNSIAIPTNFTISVTTEILPVSMTKTSVDCTMYICGDSTECSNLLLQYGSFCTQLNRALTGIAVEQDKNTQEVFAQVKQIYKTPPIKDFGGFNFSQILPDPSKPSKRSFIEDLLFNKVTLADAGFIKQYGDCLGDIAARDLICAQKFNGLTVLPPLLTDEMIAQYTSALLAGTITSGWTFGAGAALQIPFAMQMAYRFNGIGVTCNVLYENQKLIANQFNSAIGKIQDSLSSTASALGKLQDVVNQNAQALNTLVKQLSSNFGAISSVLNDILSRLDPPEAEVQIDRLITGRLQSLQTYVTQQLIRAAEIRASANLAATKMSECVLGQSKRVDFCGKGYHLMSFPQSAPHGVVFLHVTYVPAQEKNFTTAPAICHDGKAHCPREGVFVSNGTHWFVTQRNFYEPQIITTDNTFVSGNCDVVIGIVNNTVYDPLQPELDSFKEELDKYFKNHTSPDVDLGDISGINASVVNIQKEIDRLNEVAKNLNESLIDLQELGKYEQ

SEQ ID NO: 65 - protein, 1208 aa, Artificial Sequence
  Description of Artificial Sequence: Synthetic polypeptide
MFVFLVLLPLVSSQCVNLTTRTQLPPAYTNSFTRGVYYPDKVFRSSVLHSTQDLFLPFFSNVTWFHAIHVSGTNGTKRFDNPVLPFNDGVYFASTEKSNIIRGWIFGTTLDSKTQSLLIVNNATNVVIKVCEFQFCNDPFLGVYYHKNNKSWMESEFRVYSSANNCTFEYVSQPFLMDLEGKQGNFKNLREFVFKNIDGYFKIYSKHTPINLVRDLPQGFSALEPLVDLPIGINITRFQTLLALHRSYLTPGDSSSGWTAGAAAYYVGYLQPRTFLLKYNENGTITDAVDCALDPLSETKCTLKSFTVEKGIYQTSNFRVQPTESIVRFPNITNLCPFGEVFNATRFASVYAWNRKRISNCVADYSVLYNSASFSTFKCYGVSPTKLNDLCFTNVYADSFVIRGDEVRQIAPGQTGKIADYNYKLPDDFTGCVIAWNSNNLDSKVGGNYNYLYRLFRKSNLKPFERDISTEIYQAGSTPCNGVEGFNCYFPLQSYGFQPTNGVGYQPYRVVVLSFELLHAPATVCGPKKSTNLVKNKCVNFNFNGLTGTGVLTESNKKFLPFQQFGRDIADTTDAVRDPQTLEILDITPCSFGGVSVITPGTNTSNQVAVLYQDVNCTEVPVAIHADQLTPTWRVYSTGSNVFQTRAGCLIGAEHVNNSYECDIPIGAGICASYQTQTNSPGSASSVASQSIIAYTMSLGAENSVAYSNNSICIPTNFTISVTTEILPVSMTKTSVDCTMYICGDSTECSNLLLQYGSFCTQLNRALTGIAVEQDKNTQEVFAQVKQIYKTPPIKDFGGFNFSQILPDPSKPSKRSFIEDLLFNKVTLADAGFIKQYGDCLGDIAARDLICAQKFNGLTVLPPLLTDEMIAQYTSALLAGTITSGWTFGAGAACQIPFAMQMAYRFNGIGVTQNVLYENQKLIANQFNSAIGKIQDSLSSTASALGKLQDVVNQNAQALNTLVKQLSSNFGAISSVLNDILSRLDPPEAEVQIDRLITGRLQSLQTYVTQQLIRAAEIRASANLAATKMSECVLGQSKRVDFCGKGYHLMSFPQSAPHGVVFLHVTYVPAQEKNFTTAPAICHDGKAHFPREGVFVSNGTHWFVTQRNFYEPQIITTDNTFVSGNCDVVIGIVNNTVYDPLQPELDSFKEELDKYFKNHTSPDVDLGDISGINASVVNIQKEIDRLNEVAKNLNESLIDLQELGKYEQ

SEQ ID NO: 66 - protein, 1208 aa, Artificial Sequence
  Description of Artificial Sequence: Synthetic polypeptide
MFVFLVLLPLVSSQCVNLTTRTQLPPAYTNSFTRGVYYPDKVFRSSVLHSTQDLFLPFFSNVTWFHAIHVSGTNGTKRFDNPVLPFNDGVYFASTEKSNIIRGWIFGTTLDSKTQSLLIVNNATNVVIKVCEFQFCNDPFLGVYYHKNNKSWMESEFRVYSSANNCTFEYVSQPFLMDLEGKQGNFKNLREFVFKNIDGYFKIYSKHTPINLVRDLPQGFSALEPLVDLPIGINITRFQTLLALHRSYLTPGDSSSGWTAGAAAYYVGYLQPRTFLLKYNENGTITDAVDCALDPLSETKCTLKSFTVEKGIYQTSNFRVQPTESIVRFPNITNLCPFGEVFNATRFASVYAWNRKRISNCVADYSVLYNSASFSTFKCYGVSPTKLNDLCFTNVYADSFVIRGDEVRQIAPGQTGKIADYNYKLPDDFTGCVIAWNSNNLDSKVGGNYNYLYRLFRKSNLKPFERDISTEIYQAGSTPCNGVEGFNCYFPLQSYGFQPTNGVGYQPYRVVVLSFELLHAPATVCGPKKSTNLVKNKCVNFNFNGLTGTGVLTESNKKFLPFQQFGRDIADTTDAVRDPQTLEILDITPCSFGGVSVITPGTNTSNQVAVLYQDVNCTEVPVAIHADQLTPTWRVYSTGSNVFQTRAGCLIGAEHVNNSYECDIPIGAGICASYQTQTNSPGSASSVASQSIIAYTMSLGAENSVAYSNNSIAIPTNFTISVTTEILPVSMTKTSVDCTMYICGDSTECSNLLLQYGSFCTQLNRALTGIAVEQDKNTQEVFAQVKQIYKTPPIKDFGGFNFSQILPDPSKPSKRSFIEDLLFNKVTLADAGFIKQYGDCLGDIAARDLICAQKFNGLTVLPPLLTDEMIAQYTSALLAGTITSGWTFGACAALQIPFAMQMAYRFNGIGVTQNVLYENQKLIANQFNSAIGKIQDSLSSTASALGKLQDVVNQNAQALNTLVKQLSSNFGAISSVLNDILSRLDPPEAEVQIDRLITGRLQSLQTYVTQQLIRAAEIRASANLAATKMSECVLGQSKRVDFCGKGYHLMSFPQSAPHGVVFLHVTYVPAQEKNFTTAPAICHDGKAHFPREGVFVSNGTHWFVTQRCFYEPQIITTDNTFVSGNCDVVIGIVNNTVYDPLQPELDSFKEELDKYFKNHTSPDVDLGDISGINASVVNIQKEIDRLNEVAKNLNESLIDLQELGKYEQ

SEQ ID NO: 67 - protein, 1208 aa, Artificial Sequence
  Description of Artificial Sequence: Synthetic polypeptide
MFVFLVLLPLVSSQCVNLTTRTQLPPAYTNSFTRGVYYPDKVFRSSVLHSTQDLFLPFFSNVTWFHAIHVSGTNGTKRFDNPVLPFNDGVYFASTEKSNIIRGWIFGTTLDSKTQSLLIVNNATNVVIKVCEFQFCNDPFLGVYYHKNNKSWMESEFRVYSSANNCTFEYVSQPFLMDLEGKQGNFKNLREFVFKNIDGYFKIYSKHTPINLVRDLPQGFSALEPLVDLPIGINITRFQTLLALHRSYLTPGDSSSGWTAGAAAYYVGYLQPRTFLLKYNENGTITDAVDCALDPLSETKCTLKSFTVEKGIYQTSNFRVQPTESIVRFPNITNLCPFGEVFNATRFASVYAWNRKRISNCVADYSVLYNSASFSTFKCYGVSPTKLNDLCFTNVYADSFVIRGDEVRQIAPGQTGKIADYNYKLPDDFTGCVIAWNSNNLDSKVGGNYNYLYRLFRKSNLKPFERDISTEIYQAGSTPCNGVEGFNCYFPLQSYGFQPTNGVGYQPYRVVVLSFELLHAPATVCGPKKSTNLVKNKCVNFNFNGLTGTGVLTESNKKFLPFQQFGRDIADTTDAVRDPQTLEILDITPCSFGGVSVITPGTNTSNQVAVLYQDVNCTEVPVAIHADQLTPTWRVYSTGSNVFQTRAGCLIGAEHVNNSYECDIPIGAGICASYQTQTNSPGSASSVASQSIIAYTMSLGAENSVAYSNNSIAIPTNFTISVTTEILPVSMTKTSVDCTMYICGDSTECSNLLLCYGSFCTQLNRALTGIAVEQDKNTQEVFAQVKQIYKTPPIKDFGGFNFSQILPDPSKPSKRSFIEDLLFNKVTLADAGFIKQYGDCLGDIAARDLICAQKFNGLTVLPPLLTDEMIAQYTSALLAGTITSGWTFGAGAALQIPFAMQMAYRFNGIGVTQNVLYENQKLIANQFNSAIGKIQDSLSSTASALGKLQDVVNQNAQALNTLVKQLSSCFGAISSVLNDILSRLDPPEAEVQIDRLITGRLQSLQTYVTQQLIRAAEIRASANLAATKMSECVLGQSKRVDFCGKGYHLMSFPQSAPHGVVFLHVTYVPAQEKNFTTAPAICHDGKAHFPREGVFVSNGTHWFVTQRNFYEPQIITTDNTFVSGNCDVVIGIVNNTVYDPLQPELDSFKEELDKYFKNHTSPDVDLGDISGINASVVNIQKEIDRLNEVAKNLNESLIDLQELGKYEQ

SEQ ID NO: 68 - protein, 1208 aa, Artificial Sequence
  Description of Artificial Sequence: Synthetic polypeptide
MFVFLVLLPLVSSQCVNLTTRTQLPPAYTNSFTRGVYYPDKVFRSSVLHSTQDLFLPFFSNVTWFHAIHVSGTNGTKRFDNPVLPFNDGVYFASTEKSNIIRGWIFGTTLDSKTQSLLIVNNATNVVIKVCEFQFCNDPFLGVYYHKNNKSWMESEFRVYSSANNCTFEYVSQPFLMDLEGKQGNFKNLREFVFKNIDGYFKIYSKHTPINLVRDLPQGFSALEPLVDLPIGINITRFQTLLALHRSYLTPGDSSSGWTAGAAAYYVGYLQPRTFLLKYNENGTITDAVDCALDPLSETKCTLKSFTVEKGIYQTSNFRVQPTESIVRFPNITNLCPFGEVFNATRFASVYAWNRKRISNCVADYSVLYNSASFSTFKCYGVSPTKLNDLCFTNVYADSFVIRGDEVRQIAPGQTGKIADYNYKLPDDFTGCVIAWNSNNLDSKVGGNYNYLYRLFRKSNLKPFERDISTEIYQAGSTPCNGVEGFNCYFPLQSYGFQPTNGVGYQPYRVVVLSFELLHAPATVCGPKKSTNLVKNKCVNFNFNGLTGTGVLTESNKKFLPFQQFGRDIADTTDAVRDPQTLEILDITPCSFGGVSVITPGTNTSNQVAVLYQDVNCTEVPVAIHADQLTPTWRVYSTGSNVFQTRAGCLIGAEHVNNSYECDIPIGAGICASYQTQTNSPGSASSVASQSIIAYTMSLGAENSVAYSNNSIAIPTNFTISVTTEILPVSMTKTSVDCTMYICGDSTECSNLLLQYGSFCTQLNRALTGIAVEQDKNTQEVFAQVKQIYKTPPIKDFGGFNFSQILPDPSKPSKRSFIEDLLFNKVTLADAGFIKQYGDCLGDIAARDLICAQKFNGLTVLPPLLTDEMIAQYTSALLAGTITSGWTFGAGAALQIPFAMQMAYRFNGIGVTCNVLYENQKLIANQFNSAIGKIQDSLSSTASALGKLQDVVNQNAQALNTLVKQLSSNFGAISSVLNDILSRLDPPEAEVQIDRLITGRLQSLQTYVTQQLIRAAEIRASANLAATKMSECVLGQSKRVDFCGKGYHLMSFPQSAPHGVVFLHVTYVPAQEKNFTTAPAICHDGKAHFPREGVFVSNGTHWFVTQRNFYEPQIITTDNTFVSCNCDVVIGIVNNTVYDPLQPELDSFKEELDKYFKNHTSPDVDLGDISGINASVVNIQKEIDRLNEVAKNLNESLIDLQELGKYEQ

SEQ ID NO: 69 - protein, 1208 aa, Artificial Sequence
  Description of Artificial Sequence: Synthetic polypeptide
MFVFLVLLPLVSSQCVNLTTRTQLPPAYTNSFTRGVYYPDKVFRSSVLHSTQDLFLPFFSNVTWFHAIHVSGTNGTKRFDNPVLPFNDGVYFASTEKSNIIRGWIFGTTLDSKTQSLLIVNNATNVVIKVCEFQFCNDPFLGVYYHKNNKSWMESEFRVYSSANNCTFEYVSQPFLMDLEGKQGNFKNLREFVFKNIDGYFKIYSKHTPINLVRDLPQGFSALEPLVDLPIGINITRFQTLLALHRSYLTPGDSSSGWTAGAAAYYVGYLQPRTFLLKYNENGTITDAVDCALDPLSETKCTLKSFTVEKGIYQTSNFRVQPTESIVRFPNITNLCPFGEVFNATRFASVYAWNRKRISNCVADYSVLYNSASFSTFKCYGVSPTKLNDLCFTNVYADSFVIRGDEVRQIAPGQTGKIADYNYKLPDDFTGCVIAWNSNNLDSKVGGNYNYLYRLFRKSNLKPFERDISTEIYQAGSTPCNGVEGFNCYFPLQSYGFQPTNGVGYQPYRVVVLSFELLHAPATVCGPKKSTNLVKNKCVNFNFNGLTGTGVLTESNKKFLPFQQFGRDIADTTDAVRDPQTLEILDITPCSFGGVSVITPGTNTSNQVAVLYQDVNCTEVPVAIHADQLTPTWRVYSTGSNVFQTRAGCLIGAEHVNNSYECDIPIGAGICASYQTQTNSPGSASSVASQSIIAYTMSLGAENSVAYSNNSIAIPTNFTISVTTEILPVSMTKTSVDCTMYICGDSTECSNLLLQYGSFCTQLNRALTGIAVEQDKNTQEVFAQVKQIYKTPPIKDFGGFNFSQILPDPSKPSKRSFIEDLLFNKVTLADAGFIKQYGDCLGDIAARDLICAQKFNGLTVLPPLLTDEMIAQYTSALLAGTITSGWCFGAGAALQIPFAMQMAYRFNGIGVTQNVLYENQKLIANQFNSAIGKIQDSLSSTASALGKLQDVVNQNAQALNTLVKQLSSNFGAISSVLNDILSRLDPPEAEVQIDRLITGRLQSLQTYVTQQLIRAAEIRASANLAATKMSECVLGQSKRVDFCGKGYHLMSFPQSAPHGVVFLHVTYVPAQEKNFTTAPAICHDGKAHFPRCGVFVSNGTHWFVTQRNFYEPQIITTDNTFVSGNCDVVIGIVNNTVYDPLQPELDSFKEELDKYFKNHTSPDVDLGDISGINASVVNIQKEIDRLNEVAKNLNESLIDLQELGKYEQ

SEQ ID NO: 70 - protein, 1208 aa, Artificial Sequence
  Description of Artificial Sequence: Synthetic polypeptide
MFVFLVLLPLVSSQCVNLTTRTQLPPAYTNSFTRGVYYPDKVFRSSVLHSTQDLFLPFFSNVTWFHAIHVSGTNGTKRFDNPVLPFNDGVYFASTEKSNIIRGWIFGTTLDSKTQSLLIVNNATNVVIKVCEFQFCNDPFLGVYYHKNNKSWMESEFRVYSSANNCTFEYVSQPFLMDLEGKQGNFKNLREFVFKNIDGYFKIYSKHTPINLVRDLPQGFSALEPLVDLPIGINITRFQTLLALHRSYLTPGDSSSGWTAGAAAYYVGYLQPRTFLLKYNENGTITDAVDCALDPLSETKCTLKSFTVEKGIYQTSNFRVQPTESIVRFPNITNLCPFGEVFNATRFASVYAWNRKRISNCVADYSVLYNSASFSTFKCYGVSPTKLNDLCFTNVYADSFVIRGDEVRQIAPGQTGKIADYNYKLPDDFTGCVIAWNSNNLDSKVGGNYNYLYRLFRKSNLKPFERDISTEIYQAGSTPCNGVEGFNCYFPLQSYGFQPTNGVGYQPYRVVVLSFELLHAPATVCGPKKSTNLVKNKCVNFNFNGLTGTGVLTESNKKFLPFQQFGRDIADTTDAVRDPQTLEILDITPCSFGGVSVITPGTNTSNQVAVLYQDVNCTEVPVAIHADQLTPTWRVYSTGSNVFQTRAGCLIGAEHVNNSYECDIPIGAGICASYQTQTNSPGSASSVASQSIIAYTMSLGAENSVAYSNNSIAIPTNFTISVTTEILPVSMTKTSVDCTMYICGDSTECSNLLLQYGSFCTQLNRALTGIAVEQDKNTQEVFAQVKQIYKTPPIKDFGGFNFSQILPDPSKPSKRSFIEDLLFNKVTLADAGFIKQYGDCLGDIAARDLICAQKFNGLTVLPPLLTDEMIAQYTSALLAGTITSGWTFCAGAALQIPFAMQMAYRFNGICVTQNVLYENQKLIANQFNSAIGKIQDSLSSTASALGKLQDVVNQNAQALNTLVKQLSSNFGAISSVLNDILSRLDPPEAEVQIDRLITGRLQSLQTYVTQQLIRAAEIRASANLAATKMSECVLGQSKRVDFCGKGYHLMSFPQSAPHGVVFLHVTYVPAQEKNFTTAPAICHDGKAHFPREGVFVSNGTHWFVTQRNFYEPQIITTDNTFVSGNCDVVIGIVNNTVYDPLQPELDSFKEELDKYFKNHTSPDVDLGDISGINASVVNIQKEIDRLNEVAKNLNESLIDLQELGKYEQ

SEQ ID NO: 71 - protein, 1208 aa, Artificial Sequence
  Description of Artificial Sequence: Synthetic polypeptide
MFVFLVLLPLVSSQCVNLTTRTQLPPAYTNSFTRGVYYPDKVFRSSVLHSTQDLFLPFFSNVTWFHAIHVSGTNGTKRFDNPVLPFNDGVYFASTEKSNIIRGWIFGTTLDSKTQSLLIVNNATNVVIKVCEFQFCNDPFLGVYYHKNNKSWMESEFRVYSSANNCTFEYVSQPFLMDLEGKQGNFKNLREFVFKNIDGYFKIYSKHTPINLVRDLPQGFSALEPLVDLPIGINITRFQTLLALHRSYLTPGDSSSGWTAGAAAYYVGYLQPRTFLLKYNENGTITDAVDCALDPLSETKCCLKSFTVEKGIYQTSNFRVQPTESIVRFPNITNLCPFGEVFNATRFASVYAWNRKRISNCVADYSVLYNSASFSTFKCYGVSPTKLNDLCFTNVYADSFVIRGDEVRQIAPGQTGKIADYNYKLPDDFTGCVIAWNSNNLDSKVGGNYNYLYRLFRKSNLKPFERDISTEIYQAGSTPCNGVEGFNCYFPLQSYGFQPTNGVGYQPYRVVVLSFELLHAPATVCGPKKSTNLVKNKCVNFNFNGLTGTGVLTESNKKFLPFQQFGRDIADTTDAVRDPQTLEILDITPCSFGGVSVITPGTNTSNQVAVLYQDVNCTEVPVAIHADQLTPTWRVYSTGSNVFQTRAGCLIGAEHVNNSYECDIPIGAGICASYQTQTNSPGSASSVASQSIIAYTMSLGAENSVAYSNNSIAIPTNFTISVTTEILPVSMTKTSVDCTMYICGDSTECSNLLLQYGSFCCQLNRALTGIAVEQDKNTQEVFAQVKQIYKTPPIKDFGGFNFSQILPDPSKPSKRSFIEDLLFNKVTLADAGFIKQYGDCLGDIAARDLICAQKFNGLTVLPPLLTDEMIAQYTSALLAGTITSGWTFGAGAALQIPFAMQMAYRFNGIGVTQNVLYENQKLIANQFNSAIGKIQDSLSSTASALGKLQDVVNQNAQALNTLVKQLSSNFGAISSVLNDILSRLDPPEAEVQIDRLITGRLQSLQTYVTQQLIRAAEIRASANLAATKMSECVLGQSKRVDFCGKGYHLMSFPQSAPHGVVFLHVTYVPAQEKNFTTAPAICHDGKAHFPREGVFVSNGTHWFVTQRNFYEPQIITTDNTFVSGNCDVVIGIVNNTVYDPLQPELDSFKEELDKYFKNHTSPDVDLGDISGINASVVNIQKEIDRLNEVAKNLNESLIDLQELGKYEQ

SEQ ID NO: 72 - protein, 1208 aa, Artificial Sequence
  Description of Artificial Sequence: Synthetic polypeptide
MFVFLVLLPLVSSQCVNLTTRTQLPPAYTNSFTRGVYYPDKVFRSSVLHSTQDLFLPFFSNVTWFHAIHVSGTNGTKRFDNPVLPFNDGVYFASTEKSNIIRGWIFGTTLDSKTQSLLIVNNATNVVIKVCEFQFCNDPFLGVYYHKNNKSWMESEFRVYSSANNCTFEYVSQPFLMDLEGKQGNFKNLREFVFKNIDGYFKIYSKHTPINLVRDLPQGFSALEPLVDLPIGINITRFQTLLALHRSYLTPGDSSSGWTAGAAAYYVGYLQPRTFLLKYNENGTITDAVDCALDPLSETKCTLKSFTVEKGIYQTSNFRVQPTESIVRFPNITNLCPFGEVFNATRFASVYAWNRKRISNCVADYSVLYNSASFSTFKCYGVSPTKLNDLCFTNVYADSFVIRGDEVRQIAPGQTGKIADYNYKLPDDFTGCVIAWNSNNLDSKVGGNYNYLYRLFRKSNLKPFERDISTEIYQAGSTPCNGVEGFNCYFPLQSYGFQPTNGVGYQPYRVVVLSFELLHAPATVCGPKKSTNLVKNKCVNFNFNGLTGTGVLTESNKKFLPFQQFGRDIADTTDAVRDPQTLEILDITPCSFGGVSVITPGTNTSNQVAVLYQDVNCTEVPVAIHADQLTPTWRVYSTGSNVFQTRAGCLIGAEHVNNSYECDIPIGAGICASYQTQTNSPGSASSVASQSIIAYTMSLGAENSVAYSNNSIAIPTNFTISVTTEILPVLMTKTSVDCTMYICGDSTECSNLLLQYGSFCTQLNRALTGIAVEQDKNVQEVFAQVKQIYKTPPIKDFGGFNFSQILPDPSKPSKRSFIEDLLFNKVTLADAGFIKQYGDCLGDIAARDLICAQKFNGLTVLPPLLTDEMIAQYTSALLAGTITSGWTFGAGAALQIPFAMQMAYRFNGIGVTQNVLYENQKLIANQFNSAIGKIQDSLSSTASALGKLQDVVNQNAQALNTLVKQLSSNFGAISSVLNDILSRLDPPEAEVQIDRLITGRLQSLQTYVTQQLIRAAEIRASANLAATKMSECVLGQSKRVDFCGKGYHLMSFPQSAPHGVVFLHVTYVPAQEKNFTTAPAICHDGKAHFPREGVFVSNGTHWFVTQRNFYEPQIITTDNTFVSGNCDVVIGIVNNTVYDPLQPELDSFKEELDKYFKNHTSPDVDLGDISGINASVVNIQKEIDRLNEVAKNLNESLIDLQELGKYEQ

SEQ ID NO: 73 - protein, 1208 aa, Artificial Sequence
  Description of Artificial Sequence: Synthetic polypeptide
MFVFLVLLPLVSSQCVNLTTRTQLPPAYTNSFTRGVYYPDKVFRSSVLHSTQDLFLPFFSNVTWFHAIHVSGTNGTKRFDNPVLPFNDGVYFASTEKSNIIRGWIFGTTLDSKTQSLLIVNNATNVVIKVCEFQFCNDPFLGVYYHKNNKSWMESEFRVYSSANNCTFEYVSQPFLMDLEGKQGNFKNLREFVFKNIDGYFKIYSKHTPINLVRDLPQGFSALEPLVDLPIGINITRFQTLLALHRSYLTPGDSSSGWTAGAAAYYVGYLQPRTFLLKYNENGTITDAVDCALDPLSETKCTLKSFTVEKGIYQTSNFRVQPTESIVRFPNITNLCPFGEVFNATRFASVYAWNRKRISNCVADYSVLYNSASFSTFKCYGVSPTKLNDLCFTNVYADSFVIRGDEVRQIAPGQTGKIADYNYKLPDDFTGCVIAWNSNNLDSKVGGNYNYLYRLFRKSNLKPFERDISTEIYQAGSTPCNGVEGFNCYFPLQSYGFQPTNGVGYQPYRVVVLSFELLHAPATVCGPKKSTNLVKNKCVNFNFNGLTGTGVLTESNKKFLPFQQFGRDIADTTDAVRDPQTLEILDITPCSFGGVSVITPGTNTSNQVAVLYQDVNCTEVPVAIHADQLTPTWRVYSTGSNVFQTRAGCLIGAEHVNNSYECDIPIGAGICASYQTQTNSPGSASSVASQSIIAYTMSLGAENSVAYSNNSIAIPTNFTISVTTEILPVSMTKISVDCTMYICGDSTECSNLLLQYGSFCTQLNRALTGIAVEQDKNTQEVFAQVKQIYKTPPIKDFGGFNFSQILPDPSKPSKRSFIEDLLFNKVTLADAGFIKQYGDCLGDIAARDLICAQKFNGLTVLPPLLTDEMIAQYTSALLAGTITSGWTFGAGAALQIPFAMQMAYRFNGIGVTQNVLYENQKLIANQFNSAIGKIQDSLSSTASALGKLQDVVNQNAQALNTLVKQLSSNFGAISSVLNDILSRLDPPEAEVQIDRLITGRLQSLQTYVTQLLIRAAEIRASANLAATKMSECVLGQSKRVDFCGKGYHLMSFPQSAPHGVVFLHVTYVPAQEKNFTTAPAICHDGKAHFPREGVFVSNGTHWFVTQRNFYEPQIITTDNTFVSGNCDVVIGIVNNTVYDPLQPELDSFKEELDKYFKNHTSPDVDLGDISGINASVVNIQKEIDRLNEVAKNLNESLIDLQELGKYEQ

SEQ ID NO: 74 - protein, 1208 aa, Artificial Sequence
  Description of Artificial Sequence: Synthetic polypeptide
MFVFLVLLPLVSSQCVNLTTRTQLPPAYTNSFTRGVYYPDKVFRSSVLHSTQDLFLPFFSNVTWFHAIHVSGTNGTKRFDNPVLPFNDGVYFASTEKSNIIRGWIFGTTLDSKTQSLLIVNNATNVVIKVCEFQFCNDPFLGVYYHKNNKSWMESEFRVYSSANNCTFEYVSQPFLMDLEGKQGNFKNLREFVFKNIDGYFKIYSKHTPINLVRDLPQGFSALEPLVDLPIGINITRFQTLLALHRSYLTPGDSSSGWTAGAAAYYVGYLQPRTFLLKYNENGTITDAVDCALDPLSETKCTLKSFTVEKGIYQTSNFRVQPTESIVRFPNITNLCPFGEVFNATRFASVYAWNRKRISNCVADYSVLYNSASFSTFKCYGVSPTKLNDLCFTNVYADSFVIRGDEVRQIAPGQTGKIADYNYKLPDDFTGCVIAWNSNNLDSKVGGNYNYLYRLFRKSNLKPFERDISTEIYQAGSTPCNGVEGFNCYFPLQSYGFQPTNGVGYQPYRVVVLSFELLHAPATVCGPKKSTNLVKNKCVNFNFNGLTGTGVLTESNKKFLPFQQFGRDIADTTDAVRDPQTLEILDITPCSFGGVSVITPGTNTSNQVAVLYQDVNCTEVPVAIHADQLTPTWRVYSTGSNVFQTRAGCLIGAEHVNNSYECDIPIGAGICASYQTQTNSPGSASSVASQSIIAYTMSLGAENSVAYSNNSIAIPTNFTISVTTEILPVSMTKTSVDCTMYICGDSTECSNLLLQYGSFCTQLNRALTGIAVEQDKNTQEVFAQVKQIYKTPPIKDFGGFNFSQILPDPSKPSKRSFIEDLLFNKVTLADAGFIKQYGDCLGDIAARDLICAQKFNGLTVLPPLLTDEMIAQYTSALLAGIITSGWTFGAGAALQIPFAMQMAYRFNGIGVTQNVLYENQKLIANQFNSAIGKIQDSLSSTASALGKLQDVVNQNAQALNTLVKQLSSNFGAISSVLNDILSRLDPPEAEVQIDRLITGRLQSLQTYVTQQLIRAAEIRASANLAATKMSECVLGQSKRVDFCGKGYHLMSFPQSAPHGVVFLHVTYVPAQEKNFTTAPAICHDGKAHFPREGVFVSNGTHWFVTQRNFYEPQIITTDNTFVSGNCDVVIGIVNNTVYDPLQPELDSFKEELDKYFKNHTSPDVDLGDISGINASVVNIQKEIDRLNEVAKNLNESLIDLQELGKYEQ

SEQ ID NO: 75 - protein, 1208 aa, Artificial Sequence
  Description of Artificial Sequence: Synthetic polypeptide
MFVFLVLLPLVSSQCVNLTTRTQLPPAYTNSFTRGVYYPDKVFRSSVLHSTQDLFLPFFSNVTWFHAIHVSGTNGTKRFDNPVLPFNDGVYFASTEKSNIIRGWIFGTTLDSKTQSLLIVNNATNVVIKVCEFQFCNDPFLGVYYHKNNKSWMESEFRVYSSANNCTFEYVSQPFLMDLEGKQGNFKNLREFVFKNIDGYFKIYSKHTPINLVRDLPQGFSALEPLVDLPIGINITRFQTLLALHRSYLTPGDSSSGWTAGAAAYYVGYLQPRTFLLKYNENGTITDAVDCALDPLSETKCTLKSFTVEKGIYQTSNFRVQPTESIVRFPNITNLCPFGEVFNATRFASVYAWNRKRISNCVADYSVLYNSASFSTFKCYGVSPTKLNDLCFTNVYADSFVIRGDEVRQIAPGQTGKIADYNYKLPDDFTGCVIAWNSNNLDSKVGGNYNYLYRLFRKSNLKPFERDISTEIYQAGSTPCNGVEGFNCYFPLQSYGFQPTNGVGYQPYRVVVLSFELLHAPATVCGPKKSTNLVKNKCVNFNFNGLTGTGVLTESNKKFLPFQQFGRDIADTTDAVRDPQTLEILDITPCSFGGVSVITPGTNTSNQVAVLYQDVNCTEVPVAIHADQLTPTWRVYSTGSNVFQTRAGCLIGAEHVNNSYECDIPIGAGICASYQTQTNSPGSASSVASQSIIAYTMSLGAENSVAYSNNSIAIPTNFTISVTTEILPVSMTKISVDCTMYICGDSTECSNLLLQYGSFCTQLNRALTGIAVEQDKNTQEVFAQVKQIYKTPPIKDFGGFNFSQILPDPSKPSKRSFIEDLLFNKVTLADAGFIKQYGDCLGDIAARDLICAQKFNGLTVLPPLLTDEMIAQYTSALLAGTITSGWTFGAGAALQIPFAMQMAYRFNGIGVTQNVLYENQKLIANQFNSAIGKIQDSLSSTASALGKLQDVVNQNAQALNTLVKQLSSNFGAISSVLNDILSRLDPPEAEVQIDRLITGRLQSLQTFVTQLLIRAAEIRASANLAATKMSECVLGQSKRVDFCGKGYHLMSFPQSAPHGVVFLHVTYVPAQEKNFTTAPAICHDGKAHFPREGVFVSNGTHWFVTQRNFYEPQIITTDNTFVSGNCDVVIGIVNNTVYDPLQPELDSFKEELDKYFKNHTSPDVDLGDISGINASVVNIQKEIDRLNEVAKNLNESLIDLQELGKYEQ

SEQ ID NO: 76 - protein, 1208 aa, Artificial Sequence
  Description of Artificial Sequence: Synthetic polypeptide
MFVFLVLLPLVSSQCVNLTTRTQLPPAYTNSFTRGVYYPDKVFRSSVLHSTQDLFLPFFSNVTWFHAIHVSGTNGTKRFDNPVLPFNDGVYFASTEKSNIIRGWIFGTTLDSKTQSLLIVNNATNVVIKVCEFQFCNDPFLGVYYHKNNKSWMESEFRVYSSANNCTFEYVSQPFLMDLEGKQGNFKNLREFVFKNIDGYFKIYSKHTPINLVRDLPQGFSALEPLVDLPIGINITRFQTLLALHRSYLTPGDSSSGWTAGAAAYYVGYLQPRTFLLKYNENGTITDAVDCALDPLSETKCTLKSFTVEKGIYQTSNFRVQPTESIVRFPNITNLCPFGEVFNATRFASVYAWNRKRISNCVADYSVLYNSASFSTFKCYGVSPTKLNDLCFTNVYADSFVIRGDEVRQIAPGQTGKIADYNYKLPDDFTGCVIAWNSNNLDSKVGGNYNYLYRLFRKSNLKPFERDISTEIYQAGSTPCNGVEGFNCYFPLQSYGFQPTNGVGYQPYRVVVLSFELLHAPATVCGPKKSTNLVKNKCVNFNFNGLTGTGVLTESNKKFLPFQQFGRDIADTTDAVRDPQTLEILDITPCSFGGVSVITPGTNTSNQVAVLYQDVNCTEVPVAIHADQLTPTWRVYSTGSNVFQTRAGCLIGAEHVNNSYECDIPIGAGICASYQTQTNSPGSASSVASQSIIAYTMSLGAENSVAYSNNSIAIPTNFTISVTTEILPVSMTKTSVDCTMYICGDSTECSNLLLQYGSFCTQLNRALTGIAVEQDKNTQEVFAQVKQIYKTPPIKDFGGFNFSQILPDPSKPSKRSFIEDLLFNKVTLADAGFIKQYGDCLGDIAARDLICAQKFNGLTVLPPLLTDEMIAQYTSALLAGTITSGWTFGAGAALQIPFAMLMAYRFNGIGVTQNVLYENQKLIANQFNSAIGKIQDSLSSTASALGKLQDVVNQNAQALNTLVKQLSSNFGAISSVLNDILSRLDPPEAEVQIDRLITGRLQSLQTYVTQQLIRAAEIRASANLAATKMSECVLGQSKRVDFCGKGYHLMSFPQSAPHGVVFLHVTYVPAQEKNFTTAPAICHDGKAHFPREGVFVSNGTHWFVTQRNFYEPQIITTDNTFVSGNCDVVIGIVNNTVYDPLQPELDSFKEELDKYFKNHTSPDVDLGDISGINASVVNIQKEIDRLNEVAKNLNESLIDLQELGKYEQ

SEQ ID NO: 77 - protein, 1208 aa, Artificial Sequence
  Description of Artificial Sequence: Synthetic polypeptide
MFVFLVLLPLVSSQCVNLTTRTQLPPAYTNSFTRGVYYPDKVFRSSVLHSTQDLFLPFFSNVTWFHAIHVSGTNGTKRFDNPVLPFNDGVYFASTEKSNIIRGWIFGTTLDSKTQSLLIVNNATNVVIKVCEFQFCNDPFLGVYYHKNNKSWMESEFRVYSSANNCTFEYVSQPFLMDLEGKQGNFKNLREFVFKNIDGYFKIYSKHTPINLVRDLPQGFSALEPLVDLPIGINITRFQTLLALHRSYLTPGDSSSGWTAGAAAYYVGYLQPRTFLLKYNENGTITDAVDCALDPLSETKCTLKSFTVEKGIYQTSNFRVQPTESIVRFPNITNLCPFGEVFNATRFASVYAWNRKRISNCVADYSVLYNSASFSTFKCYGVSPTKLNDLCFTNVYADSFVIRGDEVRQIAPGQTGKIADYNYKLPDDFTGCVIAWNSNNLDSKVGGNYNYLYRLFRKSNLKPFERDISTEIYQAGSTPCNGVEGFNCYFPLQSYGFQPTNGVGYQPYRVVVLSFELLHAPATVCGPKKSTNLVKNKCVNFNFNGLTGTGVLTESNKKFLPFQQFGRDIADTTDAVRDPQTLEILDITPCSFGGVSVITPGTNTSNQVAVLYQDVNCTEVPVAIHADQLTPTWRVYSTGSNVFQTRAGCLIGAEHVNNSYECDIPIGAGICASYQTQTNSPGSASSVASQSIIAYTMSLGAENSVAYSNNSIAIPTNFTISVTTEILPVSMTKTSVDCTMYICGDSTECSNLLLQYGSFCTQLNRALTGIAVEQDKNTQEVFAQVKQIYKTPPIKDFGGFNFSQILPDPSKPSKRSFIEDLLFNKVTLADAGFIKQYGDCLGDIAARDLICAQKFNGLTVLPPLLTDEMIAQYTSALLAGIITSGWTFGAGAALQIPFAMLMAYYFNGIGVTQNVLYENQKLIANQFNSAIGKIQDSLSSTASALGKLQDVVNQNAQALNTLVKQLSSNFGAISSVLNDILSRLDPPEAEVQIDRLITGRLQSLQTYVTQQLIRAAEIRASANLAATKMSECVLGQSKRVDFCGKGYHLMSFPQSAPHGVVFLHVTYVPAQEKNFTTAPAICHDGKAHFPREGVFVSNGTHWFVTQRNFYEPQIITTDNTFVSGNCDVVIGIVNNTVYDPLQPELDSFKEELDKYFKNHTSPDVDLGDISGINASVVNIQKEIDRLNEVAKNLNESLIDLQELGKYEQ

SEQ ID NO: 78 - protein, 1208 aa, Artificial Sequence
  Description of Artificial Sequence: Synthetic polypeptide
MFVFLVLLPLVSSQCVNLTTRTQLPPAYTNSFTRGVYYPDKVFRSSVLHSTQDLFLPFFSNVTWFHAIHVSGTNGTKRFDNPVLPFNDGVYFASTEKSNIIRGWIFGTTLDSKTQSLLIVNNATNVVIKVCEFQFCNDPFLGVYYHKNNKSWMESEFRVYSSANNCTFEYVSQPFLMDLEGKQGNFKNLREFVFKNIDGYFKIYSKHTPINLVRDLPQGFSALEPLVDLPIGINITRFQTLLALHRSYLTPGDSSSGWTAGAAAYYVGYLQPRTFLLKYNENGTITDAVDCALDPLSETKCTLKSFTVEKGIYQTSNFRVQPTESIVRFPNITNLCPFGEVFNATRFASVYAWNRKRISNCVADYSVLYNSASFSTFKCYGVSPTKLNDLCFTNVYADSFVIRGDEVRQIAPGQTGKIADYNYKLPDDFTGCVIAWNSNNLDSKVGGNYNYLYRLFRKSNLKPFERDISTEIYQAGSTPCNGVEGFNCYFPLQSYGFQPTNGVGYQPYRVVVLSFELLHAPATVCGPKKSTNLVKNKCVNFNFNGLTGTGVLTESNKKFLPFQQFGRDIADTTDAVRDPQTLEILDITPCSFGGVSVITPGTNTSNQVAVLYQDVNCTEVPVAIHADQLTPTWRVYSTGSNVFQTRAGCLIGAEHVNNSYECDIPIGAGICASYQTQTNSPGSASSVASQSIIAYTMSLGAENSVAYSNNSIAIPTNFTISVTTEILPVSMTKTSVDCTMYICGDSTECSNLLLQYGSFCTQLNRALTGIAVEQDKNTQEVFAQVKQIYKTPPIKDFGGFNFSQILPDPSKPSKRSFIEDLLFNKVTLADAGFIKQYGDCLGDIAARDLICAQKFNGLTVLPPLLTDEMIAQYTSALLAGTITSGWTFGAGAALQIPFAMQMAYRFNGIGVTQNVLYENQKLIANQFNSAIGKIQDSLSSTASALGKLQDVVNQNAQALNTLVKQLSSNFGAISSVLNDILSRLDPPEAEVQIDRLITGRLQSLQTYVTQQLIRAAEIRASANLAATKMSECVLGQSKRVDFCGKGYHLMSFPQSAPWGVVFLHVTYVPAQEKNFTTAPAICHDGKAHFPREGVFVSNGTHWFVTQRNFYEPQIITTDNTFVSGNCDVVIGIVNNTVYDPLQPELDSFKEELDKYFKNHTSPDVDLGDISGINASVVNIQKEIDRLNEVAKNLNESLIDLQELGKYEQ

SEQ ID NO: 79 - protein, 1208 aa, Artificial Sequence
  Description of Artificial Sequence: Synthetic polypeptide
MFVFLVLLPLVSSQCVNLTTRTQLPPAYTNSFTRGVYYPDKVFRSSVLHSTQDLFLPFFSNVTWFHAIHVSGTNGTKRFDNPVLPFNDGVYFASTEKSNIIRGWIFGTTLDSKTQSLLIVNNATNVVIKVCEFQFCNDPFLGVYYHKNNKSWMESEFRVYSSANNCTFEYVSQPFLMDLEGKQGNFKNLREFVFKNIDGYFKIYSKHTPINLVRDLPQGFSALEPLVDLPIGINITRFQTLLALHRSYLTPGDSSSGWTAGAAAYYVGYLQPRTFLLKYNENGTITDAVDCALDPLSETKCTLKSFTVEKGIYQTSNFRVQPTESIVRFPNITNLCPFGEVFNATRFASVYAWNRKRISNCVADYSVLYNSASFSTFKCYGVSPTKLNDLCFTNVYADSFVIRGDEVRQIAPGQTGKIADYNYKLPDDFTGCVIAWNSNNLDSKVGGNYNYLYRLFRKSNLKPFERDISTEIYQAGSTPCNGVEGFNCYFPLQSYGFQPTNGVGYQPYRVVVLSFELLHAPATVCGPKKSTNLVKNKCVNFNFNGLTGTGVLTESNKKFLPFQQFGRDIADTTDAVRDPQTLEILDITPCSFGGVSVITPGTNTSNQVAVLYQDVNCTEVPVAIHADQLTPTWRVYSTGSNVFQTRAGCLIGAEHVNNSYECDIPIGAGICASYQTQTNSPGSASSVASQSIIAYTMSLGAENSVAYSNNSIAIPTNFTISVTTEILPVSMTKTSVDCTMYICGDSTECSNLLLQYGSFCTQLNRALTGIAVEQDKNTQEVFAQVKQIYKTPPIKDFGGFNFSQILPDPSKPSKRSFIEDLLFNKVTLADAGFIKQYGDCLGDIAARDLICAQKFNGLTVLPPLLTDEMIAQYTSALLAGTITSGWTFGAGAALQIPFAMQMAYRFNGIGVTQNVLYENQKLIANQFNSAIGKIQDSLSSTASALGKLQDVVNQNAQALNTLVKQLSSNFGAISSVLNDILSRLDPPEAEVQIDRLITGRLQSLQTYVTQQLIRAAEIRASANLAATKMSECVLGQSKRVDFCGKGYHLMSFPQSAPIGVVFLHVTYVPAQEKNFTTAPAICHDGKAHFPREGVFVSNGTHWFVTQRNFYEPQIITTDNTFVSGNCDVVIGIVNNTVYDPLQPELDSFKEELDKYFKNHTSPDVDLGDISGINASVVNIQKEIDRLNEVAKNLNESLIDLQELGKYEQ

SEQ ID NO: 80 - protein, 1208 aa, Artificial Sequence
  Description of Artificial Sequence: Synthetic polypeptide
MFVFLVLLPLVSSQCVNLTTRTQLPPAYTNSFTRGVYYPDKVFRSSVLHSTQDLFLPFFSNVTWFHAIHVSGTNGTKRFDNPVLPFNDGVYFASTEKSNIIRGWIFGTTLDSKTQSLLIVNNATNVVIKVCEFQFCNDPFLGVYYHKNNKSWMESEFRVYSSANNCTFEYVSQPFLMDLEGKQGNFKNLREFVFKNIDGYFKIYSKHTPINLVRDLPQGFSALEPLVDLPIGINITRFQTLLALHRSYLTPGDSSSGWTAGAAAYYVGYLQPRTFLLKYNENGTITDAVDCALDPLSETKCTLKSFTVEKGIYQTSNFRVQPTESIVRFPNITNLCPFGEVFNATRFASVYAWNRKRISNCVADYSVLCNSASFSTFKCYGVSPTKLNDLCFTNVYADSFVIRGDEVRQIAPGQTCKIADYNYKLPDDFTGCVIAWNSNNLDSKVGGNYNYLYRLFRKSNLKPFERDISTEIYQAGSTPCNGVEGFNCYFPLQSYGFQPTNGVGYQPYRVVVLSFELLHAPATVCGPKKSTNLVKNKCVNFNFNGLTGTGVLTESNKKFLPFQQFGRDIADTTDAVRDPQTLEILDITPCSFGGVSVITPGTNTSNQVAVLYQDVNCTEVPVAIHADQLTPTWRVYSTGSNVFQTRAGCLIGAEHVNNSYECDIPIGAGICASYQTQTNSPGSASSVASQSIIAYTMSLGAENSVAYSNNSIAIPTNFTISVTTEILPVSMTKTSVDCTMYICGDSTECSNLLLQYGSFCTQLNRALTGIAVEQDKNTQEVFAQVKQIYKTPPIKDFGGFNFSQILPDPSKPSKRSFIEDLLFNKVTLADAGFIKQYGDCLGDIAARDLICAQKFNGLTVLPPLLTDEMIAQYTSALLAGTITSGWTFGAGAALQIPFAMQMAYRFNGIGVTQNVLYENQKLIANQFNSAIGKIQDSLSSTASALGKLQDVVNQNAQALNTLVKQLSSNFGAISSVLNDILSRLDPPEAEVQIDRLITGRLQSLQTYVTQQLIRAAEIRASANLAATKMSECVLGQSKRVDFCGKGYHLMSFPQSAPHGVVFLHVTYVPAQEKNFTTAPAICHDGKAHFPREGVFVSNGTHWFVTQRNFYEPQIITTDNTFVSGNCDVVIGIVNNTVYDPLQPELDSFKEELDKYFKNHTSPDVDLGDISGINASVVNIQKEIDRLNEVAKNLNESLIDLQELGKYEQ

SEQ ID NO: 81 - protein, 1208 aa, Artificial Sequence
  Description of Artificial Sequence: Synthetic polypeptide
MFVFLVLLPLVSSQCVNLTTRTQLPPAYTNSFTRGVYYPDKVFRSSVLHSTQDLFLPFFSNVTWFHAIHVSGTNGTKRFDNPVLPFNDGVYFASTEKSNIIRGWIFGTTLDSKTQSLLIVNNATNVVIKVCEFQFCNDPFLGVYYHKNNKSWMESEFRVYSSANNCTFEYVSQPFLMDLEGKQGNFKNLREFVFKNIDGYFKIYSKHTPINLVRDLPQGFSALEPLVDLPIGINITRFQTLLALHRSYLTPGDSSSGWTAGAAAYYVGYLQPRTFLLKYNENGTITDAVDCALDPLSETKCTLKSFTVEKGIYQTSNFRVQPTESIVRFPNITNLCPFGEVFNATRFASVYAWNRKRISNCVADYSVLYISASFSTFKCYGVSPTKLNDLCFTNVYADSFVIRGDEVRQIAPGQVGKIADYNYKLPDDFTGCVIAWNSNNLDSKVGGNYNYLYRLFRKSNLKPFERDISTEIYQAGSTPCNGVEGFNCYFPLQSYGFQPTNGVGYQPYRVVVLSFELLHAPATVCGPKKSTNLVKNKCVNFNFNGLTGTGVLTESNKKFLPFQQFGRDIADTTDAVRDPQTLEILDITPCSFGGVSVITPGTNTSNQVAVLYQDVNCTEVPVAIHADQLTPTWRVYSTGSNVFQTRAGCLIGAEHVNNSYECDIPIGAGICASYQTQTNSPGSASSVASQSIIAYTMSLGAENSVAYSNNSIAIPTNFTISVTTEILPVSMTKTSVDCTMYICGDSTECSNLLLQYGSFCTQLNRALTGIAVEQDKNTQEVFAQVKQIYKTPPIKDFGGFNFSQILPDPSKPSKRSFIEDLLFNKVTLADAGFIKQYGDCLGDIAARDLICAQKFNGLTVLPPLLTDEMIAQYTSALLAGTITSGWTFGAGAALQIPFAMQMAYRFNGIGVTQNVLYENQKLIANQFNSAIGKIQDSLSSTASALGKLQDVVNQNAQALNTLVKQLSSNFGAISSVLNDILSRLDPPEAEVQIDRLITGRLQSLQTYVTQQLIRAAEIRASANLAATKMSECVLGQSKRVDFCGKGYHLMSFPQSAPHGVVFLHVTYVPAQEKNFTTAPAICHDGKAHFPREGVFVSNGTHWFVTQRNFYEPQIITTDNTFVSGNCDVVIGIVNNTVYDPLQPELDSFKEELDKYFKNHTSPDVDLGDISGINASVVNIQKEIDRLNEVAKNLNESLIDLQELGKYEQ

SEQ ID NO: 82 - protein, 1208 aa, Artificial Sequence
  Description of Artificial Sequence: Synthetic polypeptide
MFVFLVLLPLVSSQCVNLTTRTQLPPAYTNSFTRGVYYPDKVFRSSVLHSTQDLFLPFFSNVTWFHAIHVSGTNGTKRFDNPVLPFNDGVYFASTEKSNIIRGWIFGTTLDSKTQSLLIVNNATNVVIKVCEFQFCNDPFLGVYYHKNNKSWMESEFRVYSSANNCTFEYVSQPFLMDLEGKQGNFKNLREFVFKNIDGYFKIYSKHTPINLVRDLPQGFSALEPLVDLPIGINITRFQTLLALHRSYLTPGDSSSGWTAGAAAYYVGYLQPRTFLLKYNENGTITDAVDCALDPLSETKCTLKSFTVEKGIYQTSNFRVQPTESIVRFPNITNLCPFGEVFNATRFASVYAWNRKRISNCVADYSVLYISASFSTFKCYGVSPTKLNDLCFTNVYADSFVIRGDEVRLIAPGLVVKIADYNYKLPDDFTGCVIAWNSNNLDSKVGGNYNYLYRLFRKSNLKPFERDISTEIYQAGSTPCNGVEGFNCYFPLQSYGFQPTNGVGYQPYRVVVLSFELLHAPATVCGPKKSTNLVKNKCVNFNFNGLTGTGVLTESNKKFLPFQQFGRDIADTTDAVRDPQTLEILDITPCSFGGVSVITPGTNTSNQVAVLYQDVNCTEVPVAIHADQLTPTWRVYSTGSNVFQTRAGCLIGAEHVNNSYECDIPIGAGICASYQTQTNSPGSASSVASQSIIAYTMSLGAENSVAYSNNSIAIPTNFTISVTTEILPVSMTKTSVDCTMYICGDSTECSNLLLQYGSFCTQLNRALTGIAVEQDKNTQEVFAQVKQIYKTPPIKDFGGFNFSQILPDPSKPSKRSFIEDLLFNKVTLADAGFIKQYGDCLGDIAARDLICAQKFNGLTVLPPLLTDEMIAQYTSALLAGTITSGWTFGAGAALQIPFAMQMAYRFNGIGVTQNVLYENQKLIANQFNSAIGKIQDSLSSTASALGKLQDVVNQNAQALNTLVKQLSSNFGAISSVLNDILSRLDPPEAEVQIDRLITGRLQSLQTYVTQQLIRAAEIRASANLAATKMSECVLGQSKRVDFCGKGYHLMSFPQSAPHGVVFLHVTYVPAQEKNFTTAPAICHDGKAHFPREGVFVSNGTHWFVTQRNFYEPQIITTDNTFVSGNCDVVIGIVNNTVYDPLQPELDSFKEELDKYFKNHTSPDVDLGDISGINASVVNIQKEIDRLNEVAKNLNESLIDLQELGKYEQ

SEQ ID NO: 83 - protein, 1208 aa, Artificial Sequence
  Description of Artificial Sequence: Synthetic polypeptide
MFVFLVLLPLVSSQCVNLTTRTQLPPAYTNSFTRGVYYPDKVFRSSVLHSTQDLFLPFFSNVTWFHAIHVSGTNGTKRFDNPVLPFNDGVYFASTEKSNIIRGWIFGTTLDSKTQSLLIVNNATNVVIKVCEFQFCNDPFLGVYYHKNNKSWMESEFRVYSSANNCTFEYVSQPFLMDLEGKQGNFKNLREFVFKNIDGYFKIYSKHTPINLVRDLPQGFSALEPLVDLPIGINITRFQTLLALHRSYLTPGDSSSGWTAGAAAYYVGYLQPRTFLLKYNENGTITDAVDCALDPLSETKCTLKSFTVEKGIYQTSNFRVQPTESIVRFPNITNLCPFGEVFNATRFASVYAWNRKRISNCVADYSVLYISASFSTFKCYGVSPTKLNDLCFTNVYADSFVIRGDEVRQIAPGQVVKIADYNYKLPDDFTGCVIAWNSNNLDSKVGGNYNYLYRLFRKSNLKPFERDISTEIYQAGSTPCNGVEGFNCYFPLQSYGFQPTNGVGYQPYRVVVLSFELLHAPATVCGPKKSTNLVKNKCVNFNFNGLTGTGVLTESNKKFLPFQQFGRDIADTTDAVRDPQTLEILDITPCSFGGVSVITPGTNTSNQVAVLYQDVNCTEVPVAIHADQLTPTWRVYSTGSNVFQTRAGCLIGAEHVNNSYECDIPIGAGICASYQTQTNSPGSASSVASQSIIAYTMSLGAENSVAYSNNSIAIPTNFTISVTTEILPVSMTKTSVDCTMYICGDSTECSNLLLQYGSFCTQLNRALTGIAVEQDKNTQEVFAQVKQIYKTPPIKDFGGFNFSQILPDPSKPSKRSFIEDLLFNKVTLADAGFIKQYGDCLGDIAARDLICAQKFNGLTVLPPLLTDEMIAQYTSALLAGTITSGWTFGAGAALQIPFAMQMAYRFNGIGVTQNVLYENQKLIANQFNSAIGKIQDSLSSTASALGKLQDVVNQNAQALNTLVKQLSSNFGAISSVLNDILSRLDPPEAEVQIDRLITGRLQSLQTYVTQQLIRAAEIRASANLAATKMSECVLGQSKRVDFCGKGYHLMSFPQSAPHGVVFLHVTYVPAQEKNFTTAPAICHDGKAHFPREGVFVSNGTHWFVTQRNFYEPQIITTDNTFVSGNCDVVIGIVNNTVYDPLQPELDSFKEELDKYFKNHTSPDVDLGDISGINASVVNIQKEIDRLNEVAKNLNESLIDLQELGKYEQ

SEQ ID NO: 84 - protein, 1208 aa, Artificial Sequence
  Description of Artificial Sequence: Synthetic polypeptide
MFVFLVLLPLVSSQCVNLTTRTQLPPAYTNSFTRGVYYPDKVFRSSVLHSTQDLFLPFFSNVTWFHAIHVSGTNGTKRFDNPVLPFNDGVYFASTEKSNIIRGWIFGTTLDSKTQSLLIVNNATNVVIKVCEFQFCNDPFLGVYYHKNNKSWMESEFRVYSSANNCTFEYVSQPFLMDLEGKQGNFKNLREFVFKNIDGYFKIYSKHTPINLVRDLPQGFSALEPLVDLPIGINITRFQTLLALHRSYLTPGDSSSGWTAGAAAYYVGYLQPRTFLLKYNENGTITDAVDCALDPLSETKCTLKSFTVEKGIYQTSNFRVQPTESIVRFPNITNLCPFGEVFNATRFASVYAWNRKRISNCVADYSVLYNSASFSTFKCYGVSCTKLNDLCFTNVYADSFVIRGDEVRQIAPGQCGKIADYNYKLPDDFTGCVIAWNSNNLDSKVGGNYNYLYRLFRKSNLKPFERDISTEIYQAGSTPCNGVEGFNCYFPLQSYGFQPTNGVGYQPYRVVVLSFELLHAPATVCGPKKSTNLVKNKCVNFNFNGLTGTGVLTESNKKFLPFQQFGRDIADTTDAVRDPQTLEILDITPCSFGGVSVITPGTNTSNQVAVLYQDVNCTEVPVAIHADQLTPTWRVYSTGSNVFQTRAGCLIGAEHVNNSYECDIPIGAGICASYQTQTNSPGSASSVASQSIIAYTMSLGAENSVAYSNNSIAIPTNFTISVTTEILPVSMTKTSVDCTMYICGDSTECSNLLLQYGSFCTQLNRALTGIAVEQDKNTQEVFAQVKQIYKTPPIKDFGGFNFSQILPDPSKPSKRSFIEDLLFNKVTLADAGFIKQYGDCLGDIAARDLICAQKFNGLTVLPPLLTDEMIAQYTSALLAGTITSGWTFGAGAALQIPFAMQMAYRFNGIGVTQNVLYENQKLIANQFNSAIGKIQDSLSSTASALGKLQDVVNQNAQALNTLVKQLSSNFGAISSVLNDILSRLDPPEAEVQIDRLITGRLQSLQTYVTQQLIRAAEIRASANLAATKMSECVLGQSKRVDFCGKGYHLMSFPQSAPHGVVFLHVTYVPAQEKNFTTAPAICHDGKAHFPREGVFVSNGTHWFVTQRNFYEPQIITTDNTFVSGNCDVVIGIVNNTVYDPLQPELDSFKEELDKYFKNHTSPDVDLGDISGINASVVNIQKEIDRLNEVAKNLNESLIDLQELGKYEQ

SEQ ID NO: 85 - protein, 1208 aa, Artificial Sequence
  Description of Artificial Sequence: Synthetic polypeptide
MFVFLVLLPLVSSQCVNLTTRTQLPPAYTNSFTRGVYYPDKVFRSSVLHSTQDLFLPFFSNVTWFHAIHVSGTNGTKRFDNPVLPFNDGVYFASTEKSNIIRGWIFGTTLDSKTQSLLIVNNATNVVIKVCEFQFCNDPFLGVYYHKNNKSWMESEFRVYSSANNCTFEYVSQPFLMDLEGKQGNFKNLREFVFKNIDGYFKIYSKHTPINLVRDLPQGFSALEPLVDLPIGINITRFQTLLALHRSYLTPGDSSSGWTAGAAAYYVGYLQPRTFLLKYNENGTITDAVDCALDPLSETKCTLKSFTVEKGIYQTSNFRVQPTESIVRFPNITNLCPFGEVFNATRFASVYAWNRKRISNCVADYSVLYNSASFSTCKCYGVSPTKLNDLCFTNVYADSFVIRGDEVRQIAPGQTCKIADYNYKLPDDFTGCVIAWNSNNLDSKVGGNYNYLYRLFRKSNLKPFERDISTEIYQAGSTPCNGVEGFNCYFPLQSYGFQPTNGVGYQPYRVVVLSFELLHAPATVCGPKKSTNLVKNKCVNFNFNGLTGTGVLTESNKKFLPFQQFGRDIADTTDAVRDPQTLEILDITPCSFGGVSVITPGTNTSNQVAVLYQDVNCTEVPVAIHADQLTPTWRVYSTGSNVFQTRAGCLIGAEHVNNSYECDIPIGAGICASYQTQTNSPGSASSVASQSIIAYTMSLGAENSVAYSNNSIAIPTNFTISVTTEILPVSMTKTSVDCTMYICGDSTECSNLLLQYGSFCTQLNRALTGIAVEQDKNTQEVFAQVKQIYKTPPIKDFGGFNFSQILPDPSKPSKRSFIEDLLFNKVTLADAGFIKQYGDCLGDIAARDLICAQKFNGLTVLPPLLTDEMIAQYTSALLAGTITSGWTFGAGAALQIPFAMQMAYRFNGIGVTQNVLYENQKLIANQFNSAIGKIQDSLSSTASALGKLQDVVNQNAQALNTLVKQLSSNFGAISSVLNDILSRLDPPEAEVQIDRLITGRLQSLQTYVTQQLIRAAEIRASANLAATKMSECVLGQSKRVDFCGKGYHLMSFPQSAPHGVVFLHVTYVPAQEKNFTTAPAICHDGKAHFPREGVFVSNGTHWFVTQRNFYEPQIITTDNTFVSGNCDVVIGIVNNTVYDPLQPELDSFKEELDKYFKNHTSPDVDLGDISGINASVVNIQKEIDRLNEVAKNLNESLIDLQELGKYEQ

SEQ ID NO: 86 - protein, 237 aa, Artificial Sequence
  Description of Artificial Sequence: Synthetic polypeptide
MFVFLVLLPLVSSQRVQPTESIVRFPNITNLCPFGEVFNATRFASVYAWNRKRISNCVADYSVLYNSASFSTFKCYGVSPTKLNDLCFTNVYADSFVIRGDEVRQIAPGQTGKIADYNYKLPDDFTGCVIAWNSNNLDSKVGGNYNYLYRLFRKSNLKPFERDISTEIYQAGSTPCNGVEGFNCYFPLQSYGFQPTNGVGYQPYRVVVLSFELLHAPATVCGPKKSTNLVKNKCVNF

SEQ ID NO: 87 - protein, 1270 aa, Artificial Sequence
  Description of Artificial Sequence: Synthetic polypeptide
MFVFLVLLPLVSSQCVNLTTRTQLPPAYTNSFTRGVYYPDKVFRSSVLHSTQDLFLPFFSNVTWFHAIHVSGTNGTKRFDNPVLPFNDGVYFASTEKSNIIRGWIFGTTLDSKTQSLLIVNNATNVVIKVCEFQFCNDPFLGVYYHKNNKSWMESEFRVYSSANNCTFEYVSQPFLMDLEGKQGNFKNLREFVFKNIDGYFKIYSKHTPINLVRDLPQGFSALEPLVDLPIGINITRFQTLLALHRSYLTPGDSSSGWTAGAAAYYVGYLQPRTFLLKYNENGTITDAVDCALDPLSETKCTLKSFTVEKGIYQTSNFRVQPTESIVRFPNITNLCPFGEVFNATRFASVYAWNRKRISNCVADYSVLYNSASFSTFKCYGVSPTKLNDLCFTNVYADSFVIRGDEVRQIAPGQTGKIADYNYKLPDDFTGCVIAWNSNNLDSKVGGNYNYLYRLFRKSNLKPFERDISTEIYQAGSTPCNGVEGFNCYFPLQSYGFQPTNGVGYQPYRVVVLSFELLHAPATVCGPKKSTNLVKNKCVNFNFNGLTGTGVLTESNKKFLPFQQFGRDIADTTDAVRDPQTLEILDITPCSFGGVSVITPGTNTSNQVAVLYQDVNCTEVPVAIHADQLTPTWRVYSTGSNVFQTRAGCLIGAEHVNNSYECDIPIGAGICASYQTQTNSPASVASQSIIAYTMSLGAENSVAYSNNSIAIPTNFTISVTTEILPVSMTKTSVDCTMYICGDSTECSNLLLQYGSFCTQLNRALTGIAVEQDKNTQEVFAQVKQIYKTPPIKDFGGFNFSQILPDPSKPSKRSFIEDLLFNKVTLADAGFIKQYGDCLGDIAARDLICAQKFNGLTVLPPLLTDEMIAQYTSALLAGTITSGWTFGAGAALQIPFAMQMAYRFNGIGVTQNVLYENQKLIANQFNSAIGKIQDSLSSTASALGKLQDVVNQNAQALNTLVKQLSSNFGAISSVLNDILSRLDKVEAEVQIDRLITGRLQSLQTYVTQQLIRAAEIRASANLAATKMSECVLGQSKRVDFCGKGYHLMSFPQSAPHGVVFLHVTYVPAQEKNFTTAPAICHDGKAHFPREGVFVSNGTHWFVTQRNFYEPQIITTDNTFVSGNCDVVIGIVNNTVYDPLQPELDSFKEELDKYFKNHTSPDVDLGDISGINASVVNIQKEIDRLNEVAKNLNESLIDLQELGKYEQYIKWPWYIWLGFIAGLIAIVMVTIMLCCMTSCCSCLKGCCSCGSCCKFDEDDSEPVLKGVKLHYT

SEQ ID NO: 88 - protein, 1208 aa, Artificial Sequence
  Description of Artificial Sequence: Synthetic polypeptide
MFVFLVLLPLVSSQCVNLTTRTQLPPAYTNSFTRGVYYPDKVFRSSVLHSTQDLFLPFFSNVTWFHAIHVSGTNGTKRFDNPVLPFNDGVYFASTEKSNIIRGWIFGTTLDSKTQSLLIVNNATNVVIKVCEFQFCNDPFLGVYYHKNNKSWMESEFRVYSSANNCTFEYVSQPFLMDLEGKQGNFKNLREFVFKNIDGYFKIYSKHTPINLVRDLPQGFSALEPLVDLPIGINITRFQTLLALHRSYLTPGDSSCGWTAGAAAYYVGYLQPRTFLLKYNENGTITDAVDCALDPLSETKCTLKSFTVEKGIYQTSNFRVQPTESIVRFPNITNLCPFGEVFNATRFASVYAWNRKRISNCVADYSVLYNSASFSTFKCYGVSPTKLNDLCFTNVYADSFVIRGDEVRQIAPGQTGKIADYNYKLPDDFTGCVIAWNSNNLDSKVGGNYNYLYRLFRKSNLKPFERDISTEIYQAGSTPCNGVEGFNCYFPLQSYGFQPTNGVGYQPYRVVVLSFELLHAPATVCGPKKSTNLVKNKCVNFNFNGLTGTGVLTESNKKFLPFQQFGRDIADTTDAVRDPQTLEILDITPCSFGGVSVITPGTNTSNQVAVLYQDVNCTEVPVAIHADQLTPTWRVYSTGSNVFQTRAGCLIGAEHVNNSYECDIPIGAGICASYQTQTNSPGSASSVASQSIIAYTMSLGAENSVAYSNNSIAIPTNFTISVTTEILPVLMTKTSVDCTMYICGDSTECSNLLLQYGSFCTQLNRALTGIAVEQDKNVQEVFAQVKQIYKTPPIKDFGGFNFSQILPDPSKPSKRSFIEDLLFNKVTLADAGFIKQYGDCLGDIAARDLICAQKFNGLTVLPPLLTDEMIAQYTSALLAGTITSGWTFGAGAALQIPFAMQMAYRFNGIGVTQNVLYENQKLIANQFNSAIGKIQDSLSSTASALGKLQDVVNQNAQALNTLVKQLSSNFGAISSVLNDILSRLCPPEAEVQIDRLITGRLQSLQTYVTQQLIRAAEIRASANLAATKMSECVLGQSKRVDFCGKGYHLMSFPQSAPHGVVFLHVTYVPAQEKNFTTAPAICHDGKAHFPREGVFVSNGTHWFVTQRNFYEPQIITTDNTFVSGNCDVVIGIVNNTVYDPLQPELDSFKEELDKYFKNHTSPDVDLGDISGINASVVNIQKEIDRLNEVAKNLNESLIDLQELGKYEQ

SEQ ID NO: 89 - protein, 1208 aa, Artificial Sequence
  Description of Artificial Sequence: Synthetic polypeptide
MFVFLVLLPLVSSQCVNLTTRTQLPPAYTNSFTRGVYYPDKVFRSSVLHSTQDLFLPFFSNVTWFHAIHVSGTNGTKRFDNPVLPFNDGVYFASTEKSNIIRGWIFGTTLDSKTQSLLIVNNATNVVIKVCEFQFCNDPFLGVYYHKNNKSWMESEFRVYSSANNCTFEYVSQPFLMDLEGKQGNFKNLREFVFKNIDGYFKIYSKHTPINLVRDLPQGFSALEPLVDLPIGINITRFQTLLALHRSYLTPGDSSCGWTAGAAAYYVGYLQPRTFLLKYNENGTITDAVDCALDPLSETKCTLKSFTVEKGIYQTSNFRVQPTESIVRFPNITNLCPFGEVFNATRFASVYAWNRKRISNCVADYSVLYNSASFSTFKCYGVSPTKLNDLCFTNVYADSFVIRGDEVRQIAPGQTGKIADYNYKLPDDFTGCVIAWNSNNLDSKVGGNYNYLYRLFRKSNLKPFERDISTEIYQAGSTPCNGVEGFNCYFPLQSYGFQPTNGVGYQPYRVVVLSFELLHAPATVCGPKKSTNLVKNKCVNFNFNGLTGTGVLTESNKKFLPFQQFGRDIADTTDAVRDPQTLEILDITPCSFGGVSVITPGTNTSNQVAVLYQDVNCTEVPVAIHADQLTPTWRVYSTGSNVFQTRAGCLIGAEHVNNSYECDIPIGAGICASYQTQTNSPGSASSVASQSIIAYTMSLGAENSVAYSNNSIAIPTNFTISVTTEILPVSMTKISVDCTMYICGDSTECSNLLLQYGSFCTQLNRALTGIAVEQDKNTQEVFAQVKQIYKTPPIKDFGGFNFSQILPDPSKPSKRSFIEDLLFNKVTLADAGFIKQYGDCLGDIAARDLICAQKFNGLTVLPPLLTDEMIAQYTSALLAGTITSGWTFGAGAALQIPFAMQMAYRFNGIGVTQNVLYENQKLIANQFNSAIGKIQDSLSSTASALGKLQDVVNQNAQALNTLVKQLSSNFGAISSVLNDILSRLCPPEAEVQIDRLITGRLQSLQTYVTQLLIRAAEIRASANLAATKMSECVLGQSKRVDFCGKGYHLMSFPQSAPHGVVFLHVTYVPAQEKNFTTAPAICHDGKAHFPREGVFVSNGTHWFVTQRNFYEPQIITTDNTFVSGNCDVVIGIVNNTVYDPLQPELDSFKEELDKYFKNHTSPDVDLGDISGINASVVNIQKEIDRLNEVAKNLNESLIDLQELGKYEQ

SEQ ID NO: 90 - protein, 1208 aa, Artificial Sequence
  Description of Artificial Sequence: Synthetic polypeptide
MFVFLVLLPLVSSQCVNLTTRTQLPPAYTNSFTRGVYYPDKVFRSSVLHSTQDLFLPFFSNVTWFHAIHVSGTNGTKRFDNPVLPFNDGVYFASTEKSNIIRGWIFGTTLDSKTQSLLIVNNATNVVIKVCEFQFCNDPFLGVYYHKNNKSWMESEFRVYSSANNCTFEYVSQPFLMDLEGKQGNFKNLREFVFKNIDGYFKIYSKHTPINLVRDLPQGFSALEPLVDLPIGINITRFQTLLALHRSYLTPGDSSCGWTAGAAAYYVGYLQPRTFLLKYNENGTITDAVDCALDPLSETKCTLKSFTVEKGIYQTSNFRVQPTESIVRFPNITNLCPFGEVFNATRFASVYAWNRKRISNCVADYSVLYNSASFSTFKCYGVSPTKLNDLCFTNVYADSFVIRGDEVRQIAPGQTGKIADYNYKLPDDFTGCVIAWNSNNLDSKVGGNYNYLYRLFRKSNLKPFERDISTEIYQAGSTPCNGVEGFNCYFPLQSYGFQPTNGVGYQPYRVVVLSFELLHAPATVCGPKKSTNLVKNKCVNFNFNGLTGTGVLTESNKKFLPFQQFGRDIADTTDAVRDPQTLEILDITPCSFGGVSVITPGTNTSNQVAVLYQDVNCTEVPVAIHADQLTPTWRVYSTGSNVFQTRAGCLIGAEHVNNSYECDIPIGAGICASYQTQTNSPGSASSVASQSIIAYTMSLGAENSVAYSNNSIAIPTNFTISVTTEILPVSMTKISVDCTMYICGDSTECSNLLLQYGSFCTQLNRALTGIAVEQDKNTQEVFAQVKQIYKTPPIKDFGGFNFSQILPDPSKPSKRSFIEDLLFNKVTLADAGFIKQYGDCLGDIAARDLICAQKFNGLTVLPPLLTDEMIAQYTSALLAGTITSGWTFGAGAALQIPFAMQMAYRFNGIGVTQNVLYENQKLIANQFNSAIGKIQDSLSSTASALGKLQDVVNQNAQALNTLVKQLSSNFGAISSVLNDILSRLCPPEAEVQIDRLITGRLQSLQTFVTQLLIRAAEIRASANLAATKMSECVLGQSKRVDFCGKGYHLMSFPQSAPHGVVFLHVTYVPAQEKNFTTAPAICHDGKAHFPREGVFVSNGTHWFVTQRNFYEPQIITTDNTFVSGNCDVVIGIVNNTVYDPLQPELDSFKEELDKYFKNHTSPDVDLGDISGINASVVNIQKEIDRLNEVAKNLNESLIDLQELGKYEQ

SEQ ID NO: 91 - protein, 1208 aa, Artificial Sequence
  Description of Artificial Sequence: Synthetic polypeptide
MFVFLVLLPLVSSQCVNLTTRTQLPPAYTNSFTRGVYYPDKVFRSSVLHSTQDLFLPFFSNVTWFHAIHVSGTNGTKRFDNPVLPFNDGVYFASTEKSNIIRGWIFGTTLDSKTQSLLIVNNATNVVIKVCEFQFCNDPFLGVYYHKNNKSWMESEFRVYSSANNCTFEYVSQPFLMDLEGKQGNFKNLREFVFKNIDGYFKIYSKHTPINLVRDLPQGFSALEPLVDLPIGINITRFQTLLALHRSYLTPGDSSCGWTAGAAAYYVGYLQPRTFLLKYNENGTITDAVDCALDPLSETKCTLKSFTVEKGIYQTSNFRVQPTESIVRFPNITNLCPFGEVFNATRFASVYAWNRKRISNCVADYSVLYNSASFSTFKCYGVSPTKLNDLCFTNVYADSFVIRGDEVRQIAPGQTGKIADYNYKLPDDFTGCVIAWNSNNLDSKVGGNYNYLYRLFRKSNLKPFERDISTEIYQAGSTPCNGVEGFNCYFPLQSYGFQPTNGVGYQPYRVVVLSFELLHAPATVCGPKKSTNLVKNKCVNFNFNGLTGTGVLTESNKKFLPFQQFGRDIADTTDAVRDPQTLEILDITPCSFGGVSVITPGTNTSNQVAVLYQDVNCTEVPVAIHADQLTPTWRVYSTGSNVFQTRAGCLIGAEHVNNSYECDIPIGAGICASYQTQTNSPGSASSVASQSIIAYTMSLGAENSVAYSNNSIAIPTNFTISVTTEILPVSMTKTSVDCTMYICGDSTECSNLLLQYGSFCTQLNRALTGIAVEQDKNTQEVFAQVKQIYKTPPIKDFGGFNFSQILPDPSKPSKRSFIEDLLFNKVTLADAGFIKQYGDCLGDIAARDLICAQKFNGLTVLPPLLTDEMIAQYTSALLAGIITSGWTFGAGAALQIPFAMLMAYYFNGIGVTQNVLYENQKLIANQFNSAIGKIQDSLSSTASALGKLQDVVNQNAQALNTLVKQLSSNFGAISSVLNDILSRLCPPEAEVQIDRLITGRLQSLQTYVTQQLIRAAEIRASANLAATKMSECVLGQSKRVDFCGKGYHLMSFPQSAPHGVVFLHVTYVPAQEKNFTTAPAICHDGKAHFPREGVFVSNGTHWFVTQRNFYEPQIITTDNTFVSGNCDVVIGIVNNTVYDPLQPELDSFKEELDKYFKNHTSPDVDLGDISGINASVVNIQKEIDRLNEVAKNLNESLIDLQELGKYEQ

SEQ ID NO: 92 - protein, 1208 aa, Artificial Sequence
  Description of Artificial Sequence: Synthetic polypeptide
MFVFLVLLPLVSSQCVNLTTRTQLPPAYTNSFTRGVYYPDKVFRSSVLHSTQDLFLPFFSNVTWFHAIHVSGTNGTKRFDNPVLPFNDGVYFASTEKSNIIRGWIFGTTLDSKTQSLLIVNNATNVVIKVCEFQFCNDPFLGVYYHKNNKSWMESEFRVYSSANNCTFEYVSQPFLMDLEGKQGNFKNLREFVFKNIDGYFKIYSKHTPINLVRDLPQGFSALEPLVDLPIGINITRFQTLLALHRSYLTPGDSSCGWTAGAAAYYVGYLQPRTFLLKYNENGTITDAVDCALDPLSETKCTLKSFTVEKGIYQTSNFRVQPTESIVRFPNITNLCPFGEVFNATRFASVYAWNRKRISNCVADYSVLYNSASFSTFKCYGVSPTKLNDLCFTNVYADSFVIRGDEVRQIAPGQTGKIADYNYKLPDDFTGCVIAWNSNNLDSKVGGNYNYLYRLFRKSNLKPFERDISTEIYQAGSTPCNGVEGFNCYFPLQSYGFQPTNGVGYQPYRVVVLSFELLHAPATVCGPKKSTNLVKNKCVNFNFNGLTGTGVLTESNKKFLPFQQFGRDIADTTDAVRDPQTLEILDITPCSFGGVSVITPGTNTSNQVAVLYQDVNCTEVPVAIHADQLTPTWRVYSTGSNVFQTRAGCLIGAEHVNNSYECDIPIGAGICASYQTQTNSPGSASSVASQSIIAYTMSLGAENSVAYSNNSIAIPTNFTISVTTEILPVSMTKTSVDCTMYICGDSTECSNLLLQYGSFCTQLNRALTGIAVEQDKNTQEVFAQVKQIYKTPPIKDFGGFNFSQILPDPSKPSKRSFIEDLLFNKVTLADAGFIKQYGDCLGDIAARDLICAQKFNGLTVLPPLLTDEMIAQYTSALLAGTITSGWTFGAGAALQIPFAMQMAYRFLGIGVTINVLYENQKLIANQFNSAIGKIQDSLSSTASALGKLQDVVNQNAQALNTLVKQLSSNFGAISSVLNDILSRLCPPEAEVQIDRLITGRLQSLQTYVTQQLIRAAEIRASANLAATKMSECVLGQSKRVDFCGKGYHLMSFPQSAPHGVVFLHVTYVPAQEKNFTTAPAICHDGKAHFPRIGVFVSNGTHWFVTQRNFYEPQIITTDNTFVSGNCDVVIGIVNNTVYDPLQPELDSFKEELDKYFKNHTSPDVDLGDISGINASVVNIQKEIDRLNEVAKNLNESLIDLQELGKYEQ

SEQ ID NO: 93 - protein, 1208 aa, Artificial Sequence
  Description of Artificial Sequence: Synthetic polypeptide
MFVFLVLLPLVSSQCVNLTTRTQLPPAYTNSFTRGVYYPDKVFRSSVLHSTQDLFLPFFSNVTWFHAIHVSGTNGTKRFDNPVLPFNDGVYFASTEKSNIIRGWIFGTTLDSKTQSLLIVNNATNVVIKVCEFQFCNDPFLGVYYHKNNKSWMESEFRVYSSANNCTFEYVSQPFLMDLEGKQGNFKNLREFVFKNIDGYFKIYSKHTPINLVRDLPQGFSALEPLVDLPIGINITRFQTLLALHRSYLTPGDSSCGWTAGAAAYYVGYLQPRTFLLKYNENGTITDAVDCALDPLSETKCTLKSFTVEKGIYQTSNFRVQPTESIVRFPNITNLCPFGEVFNATRFASVYAWNRKRISNCVADYSVLYNSASFSTFKCYGVSPTKLNDLCFTNVYADSFVIRGDEVRQIAPGQTGKIADYNYKLPDDFTGCVIAWNSNNLDSKVGGNYNYLYRLFRKSNLKPFERDISTEIYQAGSTPCNGVEGFNCYFPLQSYGFQPTNGVGYQPYRVVVLSFELLHAPATVCGPKKSTNLVKNKCVNFNFNGLTGTGVLTESNKKFLPFQQFGRDIADTTDAVRDPQTLEILDITPCSFGGVSVITPGTNTSNQVAVLYQDVNCTEVPVAIHADQLTPTWRVYSTGSNVFQTRAGCLIGAEHVNNSYECDIPIGAGICASYQTQTNSPGSASSVASQSIIAYTMSLGAENSVAYSNNSIAIPTNFTISVTTEILPVSMTKTSVDCTMYICGDSTECSNLLLQYGSFCTQLNRALTGIAVEQDKNTQEVFAQVKQIYKTPPIKDFGGFNFSQILPDPSKPSKRSFIEDLLFNKVTLADAGFIKQYGDCLGDIAARDLICAQKFNGLTVLPPLLTDEMIAQYTSALLAGTITSGWTFGAGAALQIPFAMQMAYRFLGIGVTINVLYENQKLIANQFNSAIGKIQDSLSSTASALGKLQDVVNQNAQALNTLVKQLSSNFGAISSVLNDILSRLCPPEAEVQIDRLITGRLQSLQTYVTQQLIRAAEIRASANLAATKMSECVLGQSKRVDFCGKGYHLMSFPQSAPHGVVFLHVTYVPAQEKNFTTAPAICHDGKAHFPRFGVFVSNGTHWFVTQRNFYEPQIITTDNTFVSGNCDVVIGIVNNTVYDPLQPELDSFKEELDKYFKNHTSPDVDLGDISGINASVVNIQKEIDRLNEVAKNLNESLIDLQELGKYEQ

SEQ ID NO: 94 - protein, 1208 aa, Artificial Sequence
  Description of Artificial Sequence: Synthetic polypeptide
MFVFLVLLPLVSSQCVNLTTRTQLPPAYTNSFTRGVYYPDKVFRSSVLHSTQDLFLPFFSNVTWFHAIHVSGTNGTKRFDNPVLPFNDGVYFASTEKSNIIRGWIFGTTLDSKTQSLLIVNNATNVVIKVCEFQFCNDPFLGVYYHKNNKSWMESEFRVYSSANNCTFEYVSQPFLMDLEGKQGNFKNLREFVFKNIDGYFKIYSKHTPINLVRDLPQGFSALEPLVDLPIGINITRFQTLLALHRSYLTPGDSSCGWTAGAAAYYVGYLQPRTFLLKYNENGTITDAVDCALDPLSETKCTLKSFTVEKGIYQTSNFRVQPTESIVRFPNITNLCPFGEVFNATRFASVYAWNRKRISNCVADYSVLYNSASFSTFKCYGVSPTKLNDLCFTNVYADSFVIRGDEVRQIAPGQTGKIADYNYKLPDDFTGCVIAWNSNNLDSKVGGNYNYLYRLFRKSNLKPFERDISTEIYQAGSTPCNGVEGFNCYFPLQSYGFQPTNGVGYQPYRVVVLSFELLHAPATVCGPKKSTNLVKNKCVNFNFNGLTGTGVLTESNKKFLPFQQFGRDIADTTDAVRDPQTLEILDITPCSFGGVSVITPGTNTSNQVAVLYQDVNCTEVPVAIHADQLTPTWRVYSTGSNVFQTRAGCLIGAEHVNNSYECDIPIGAGICASYQTQTNSPGSASSVASQSIIAYTMSLGAENSVAYSNNSIAIPTNFTISVTTEILPVLMTKTSVDCTMYICGDSTECSNLLLQYGSFCTQLNRALTGIAVEQDKNVQEVFAQVKQIYKTPPIKDFGGFNFSQILPDPSKPSKRSFIEDLLFNKVTLADAGFIKQYGDCLGDIAARDLICAQKFNGLTVLPPLLTDEMIAQYTSALLAGTITSGWTFGAGAALQIPFAMQMAYRFLGIGVTINVLYENQKLIANQFNSAIGKIQDSLSSTASALGKLQDVVNQNAQALNTLVKQLSSNFGAISSVLNDILSRLCPPEAEVQIDRLITGRLQSLQTYVTQQLIRAAEIRASANLAATKMSECVLGQSKRVDFCGKGYHLMSFPQSAPHGVVFLHVTYVPAQEKNFTTAPAICHDGKAHFPRIGVFVSNGTHWFVTQRNFYEPQIITTDNTFVSGNCDVVIGIVNNTVYDPLQPELDSFKEELDKYFKNHTSPDVDLGDISGINASVVNIQKEIDRLNEVAKNLNESLIDLQELGKYEQ

SEQ ID NO: 95 - protein, 1208 aa, Artificial Sequence
  Description of Artificial Sequence: Synthetic polypeptide
MFVFLVLLPLVSSQCVNLTTRTQLPPAYTNSFTRGVYYPDKVFRSSVLHSTQDLFLPFFSNVTWFHAIHVSGTNGTKRFDNPVLPFNDGVYFASTEKSNIIRGWIFGTTLDSKTQSLLIVNNATNVVIKVCEFQFCNDPFLGVYYHKNNKSWMESEFRVYSSANNCTFEYVSQPFLMDLEGKQGNFKNLREFVFKNIDGYFKIYSKHTPINLVRDLPQGFSALEPLVDLPIGINITRFQTLLALHRSYLTPGDSSCGWTAGAAAYYVGYLQPRTFLLKYNENGTITDAVDCALDPLSETKCTLKSFTVEKGIYQTSNFRVQPTESIVRFPNITNLCPFGEVFNATRFASVYAWNRKRISNCVADYSVLYNSASFSTFKCYGVSPTKLNDLCFTNVYADSFVIRGDEVRQIAPGQTGKIADYNYKLPDDFTGCVIAWNSNNLDSKVGGNYNYLYRLFRKSNLKPFERDISTEIYQAGSTPCNGVEGFNCYFPLQSYGFQPTNGVGYQPYRVVVLSFELLHAPATVCGPKKSTNLVKNKCVNFNFNGLTGTGVLTESNKKFLPFQQFGRDIADTTDAVRDPQTLEILDITPCSFGGVSVITPGTNTSNQVAVLYQDVNCTEVPVAIHADQLTPTWRVYSTGSNVFQTRAGCLIGAEHVNNSYECDIPIGAGICASYQTQTNSPGSASSVASQSIIAYTMSLGAENSVAYSNNSIAIPTNFTISVTTEILPVSMTKISVDCTMYICGDSTECSNLLLQYGSFCTQLNRALTGIAVEQDKNTQEVFAQVKQIYKTPPIKDFGGFNFSQILPDPSKPSKRSFIEDLLFNKVTLADAGFIKQYGDCLGDIAARDLICAQKFNGLTVLPPLLTDEMIAQYTSALLAGTITSGWTFGAGAALQIPFAMQMAYRFLGIGVTINVLYENQKLIANQFNSAIGKIQDSLSSTASALGKLQDVVNQNAQALNTLVKQLSSNFGAISSVLNDILSRLCPPEAEVQIDRLITGRLQSLQTYVTQLLIRAAEIRASANLAATKMSECVLGQSKRVDFCGKGYHLMSFPQSAPHGVVFLHVTYVPAQEKNFTTAPAICHDGKAHFPRIGVFVSNGTHWFVTQRNFYEPQIITTDNTFVSGNCDVVIGIVNNTVYDPLQPELDSFKEELDKYFKNHTSPDVDLGDISGINASVVNIQKEIDRLNEVAKNLNESLIDLQELGKYEQ

SEQ ID NO: 96 - protein, 1208 aa, Artificial Sequence
  Description of Artificial Sequence: Synthetic polypeptide
MFVFLVLLPLVSSQCVNLTTRTQLPPAYTNSFTRGVYYPDKVFRSSVLHSTQDLFLPFFSNVTWFHAIHVSGTNGTKRFDNPVLPFNDGVYFASTEKSNIIRGWIFGTTLDSKTQSLLIVNNATNVVIKVCEFQFCNDPFLGVYYHKNNKSWMESEFRVYSSANNCTFEYVSQPFLMDLEGKQGNFKNLREFVFKNIDGYFKIYSKHTPINLVRDLPQGFSALEPLVDLPIGINITRFQTLLALHRSYLTPGDSSCGWTAGAAAYYVGYLQPRTFLLKYNENGTITDAVDCALDPLSETKCTLKSFTVEKGIYQTSNFRVQPTESIVRFPNITNLCPFGEVFNATRFASVYAWNRKRISNCVADYSVLYNSASFSTFKCYGVSPTKLNDLCFTNVYADSFVIRGDEVRQIAPGQTGKIADYNYKLPDDFTGCVIAWNSNNLDSKVGGNYNYLYRLFRKSNLKPFERDISTEIYQAGSTPCNGVEGFNCYFPLQSYGFQPTNGVGYQPYRVVVLSFELLHAPATVCGPKKSTNLVKNKCVNFNFNGLTGTGVLTESNKKFLPFQQFGRDIADTTDAVRDPQTLEILDITPCSFGGVSVITPGTNTSNQVAVLYQDVNCTEVPVAIHADQLTPTWRVYSTGSNVFQTRAGCLIGAEHVNNSYECDIPIGACICASYQTQTNSPGSASSVASQSIIAYTMSLGAENSVAYSNNSIAIPTNFTISVTTEILPVSMTKTSVDCTMYICGDSTECSNLLLQYGSFCTQLNRALTGIAVEQDKNTQEVFAQVKQIYKTPPIKDFGGFNFSQILPDPSKPSKRSFIEDLLFNKVTLADAGFIKQYGDCLGDIAARDLICAQKFNGLTVLPPLLCDEMIAQYTSALLAGTITSGWTFGAGAALQIPFAMQMAYRFNGIGVTQNVLYENQKLIANQFNSAIGKIQDSLSSTASALGKLQDVVNQNAQALNTLVKQLSSNFGAISSVLNDILSRLCPPEAEVQIDRLITGRLQSLQTYVTQQLIRAAEIRASANLAATKMSECVLGQSKRVDFCGKGYHLMSFPQSAPHGVVFLHVTYVPAQEKNFTTAPAICHDGKAHFPREGVFVSNGTHWFVTQRNFYEPQIITTDNTFVSGNCDVVIGIVNNTVYDPLQPELDSFKEELDKYFKNHTSPDVDLGDISGINASVVNIQKEIDRLNEVAKNLNESLIDLQELGKYEQ

SEQ ID NO: 97 - protein, 1208 aa, Artificial Sequence
  Description of Artificial Sequence: Synthetic polypeptide
MFVFLVLLPLVSSQCVNLTTRTQLPPAYTNSFTRGVYYPDKVFRSSVLHSTQDLFLPFFSNVTWFHAIHVSGTNGTKRFDNPVLPFNDGVYFASTEKSNIIRGWIFGTTLDSKTQSLLIVNNATNVVIKVCEFQFCNDPFLGVYYHKNNKSWMESEFRVYSSANNCTFEYVSQPFLMDLEGKQGNFKNLREFVFKNIDGYFKIYSKHTPINLVRDLPQGFSALEPLVDLPIGINITRFQTLLALHRSYLTPGDSSCGWTAGAAAYYVGYLQPRTFLLKYNENGTITDAVDCALDPLSETKCTLKSFTVEKGIYQTSNFRVQPTESIVRFPNITNLCPFGEVFNATRFASVYAWNRKRISNCVADYSVLYNSASFSTFKCYGVSPTKLNDLCFTNVYADSFVIRGDEVRQIAPGQTGKIADYNYKLPDDFTGCVIAWNSNNLDSKVGGNYNYLYRLFRKSNLKPFERDISTEIYQAGSTPCNGVEGFNCYFPLQSYGFQPTNGVGYQPYRVVVLSFELLHAPATVCGPKKSTNLVKNKCVNFNFNGLTGTGVLTESNKKFLPFQQFGRDIADTTDAVRDPQTLEILDITPCSFGGVSVITPGTNTSNQVAVLYQDVNCTEVPVAIHADQLTPTWRVYSTGSNVFQTRAGCLIGAEHVNNSYECDIPIGACICASYQTQTNSPGSASSVASQSIIAYTMSLGAENSVAYSNNSIAIPTNFTISVTTEILPVLMTKTSVDCTMYICGDSTECSNLLLQYGSFCTQLNRALTGIAVEQDKNVQEVFAQVKQIYKTPPIKDFGGFNFSQILPDPSKPSKRSFIEDLLFNKVTLADAGFIKQYGDCLGDIAARDLICAQKFNGLTVLPPLLCDEMIAQYTSALLAGTITSGWTFGAGAALQIPFAMQMAYRFNGIGVTQNVLYENQKLIANQFNSAIGKIQDSLSSTASALGKLQDVVNQNAQALNTLVKQLSSNFGAISSVLNDILSRLCPPEAEVQIDRLITGRLQSLQTYVTQQLIRAAEIRASANLAATKMSECVLGQSKRVDFCGKGYHLMSFPQSAPHGVVFLHVTYVPAQEKNFTTAPAICHDGKAHFPREGVFVSNGTHWFVTQRNFYEPQIITTDNTFVSGNCDVVIGIVNNTVYDPLQPELDSFKEELDKYFKNHTSPDVDLGDISGINASVVNIQKEIDRLNEVAKNLNESLIDLQELGKYEQ

SEQ ID NO: 98 - protein, 1208 aa, Artificial Sequence
  Description of Artificial Sequence: Synthetic polypeptide
MFVFLVLLPLVSSQCVNLTTRTQLPPAYTNSFTRGVYYPDKVFRSSVLHSTQDLFLPFFSNVTWFHAIHVSGTNGTKRFDNPVLPFNDGVYFASTEKSNIIRGWIFGTTLDSKTQSLLIVNNATNVVIKVCEFQFCNDPFLGVYYHKNNKSWMESEFRVYSSANNCTFEYVSQPFLMDLEGKQGNFKNLREFVFKNIDGYFKIYSKHTPINLVRDLPQGFSALEPLVDLPIGINITRFQTLLALHRSYLTPGDSSCGWTAGAAAYYVGYLQPRTFLLKYNENGTITDAVDCALDPLSETKCTLKSFTVEKGIYQTSNFRVQPTESIVRFPNITNLCPFGEVFNATRFASVYAWNRKRISNCVADYSVLYNSASFSTFKCYGVSPTKLNDLCFTNVYADSFVIRGDEVRQIAPGQTGKIADYNYKLPDDFTGCVIAWNSNNLDSKVGGNYNYLYRLFRKSNLKPFERDISTEIYQAGSTPCNGVEGFNCYFPLQSYGFQPTNGVGYQPYRVVVLSFELLHAPATVCGPKKSTNLVKNKCVNFNFNGLTGTGVLTESNKKFLPFQQFGRDIADTTDAVRDPQTLEILDITPCSFGGVSVITPGTNTSNQVAVLYQDVNCTEVPVAIHADQLTPTWRVYSTGSNVFQTRAGCLIGAEHVNNSYECDIPIGACICASYQTQTNSPGSASSVASQSIIAYTMSLGAENSVAYSNNSIAIPTNFTISVTTEILPVSMTKISVDCTMYICGDSTECSNLLLQYGSFCTQLNRALTGIAVEQDKNTQEVFAQVKQIYKTPPIKDFGGFNFSQILPDPSKPSKRSFIEDLLFNKVTLADAGFIKQYGDCLGDIAARDLICAQKFNGLTVLPPLLCDEMIAQYTSALLAGTITSGWTFGAGAALQIPFAMQMAYRFNGIGVTQNVLYENQKLIANQFNSAIGKIQDSLSSTASALGKLQDVVNQNAQALNTLVKQLSSNFGAISSVLNDILSRLCPPEAEVQIDRLITGRLQSLQTYVTQLLIRAAEIRASANLAATKMSECVLGQSKRVDFCGKGYHLMSFPQSAPHGVVFLHVTYVPAQEKNFTTAPAICHDGKAHFPREGVFVSNGTHWFVTQRNFYEPQIITTDNTFVSGNCDVVIGIVNNTVYDPLQPELDSFKEELDKYFKNHTSPDVDLGDISGINASVVNIQKEIDRLNEVAKNLNESLIDLQELGKYEQ

SEQ ID NO: 99 - protein, 1208 aa, Artificial Sequence
  Description of Artificial Sequence: Synthetic polypeptide
MFVFLVLLPLVSSQCVNLTTRTQLPPAYTNSFTRGVYYPDKVFRSSVLHSTQDLFLPFFSNVTWFHAIHVSGTNGTKRFDNPVLPFNDGVYFASTEKSNIIRGWIFGTTLDSKTQSLLIVNNATNVVIKVCEFQFCNDPFLGVYYHKNNKSWMESEFRVYSSANNCTFEYVSQPFLMDLEGKQGNFKNLREFVFKNIDGYFKIYSKHTPINLVRDLPQGFSALEPLVDLPIGINITRFQTLLALHRSYLTPGDSSCGWTAGAAAYYVGYLQPRTFLLKYNENGTITDAVDCALDPLSETKCTLKSFTVEKGIYQTSNFRVQPTESIVRFPNITNLCPFGEVFNATRFASVYAWNRKRISNCVADYSVLYNSASFSTFKCYGVSPTKLNDLCFTNVYADSFVIRGDEVRQIAPGQTGKIADYNYKLPDDFTGCVIAWNSNNLDSKVGGNYNYLYRLFRKSNLKPFERDISTEIYQAGSTPCNGVEGFNCYFPLQSYGFQPTNGVGYQPYRVVVLSFELLHAPATVCGPKKSTNLVKNKCVNFNFNGLTGTGVLTESNKKFLPFQQFGRDIADTTDAVRDPQTLEILDITPCSFGGVSVITPGTNTSNQVAVLYQDVNCTEVPVAIHADQLTPTWRVYSTGSNVFQTRAGCLIGAEHVNNSYECDIPIGACICASYQTQTNSPGSASSVASQSIIAYTMSLGAENSVAYSNNSIAIPTNFTISVTTEILPVLMTKTSVDCTMYICGDSTECSNLLLQYGSFCTQLNRALTGIAVEQDKNVQEVFAQVKQIYKTPPIKDFGGFNFSQILPDPSKPSKRSFIEDLLFNKVTLADAGFIKQYGDCLGDIAARDLICAQKFNGLTVLPPLLCDEMIAQYTSALLAGTITSGWTFGAGAALQIPFAMQMAYRFLGIGVTINVLYENQKLIANQFNSAIGKIQDSLSSTASALGKLQDVVNQNAQALNTLVKQLSSNFGAISSVLNDILSRLCPPEAEVQIDRLITGRLQSLQTYVTQQLIRAAEIRASANLAATKMSECVLGQSKRVDFCGKGYHLMSFPQSAPHGVVFLHVTYVPAQEKNFTTAPAICHDGKAHFPRIGVFVSNGTHWFVTQRNFYEPQIITTDNTFVSGNCDVVIGIVNNTVYDPLQPELDSFKEELDKYFKNHTSPDVDLGDISGINASVVNIQKEIDRLNEVAKNLNESLIDLQELGKYEQ

SEQ ID NO: 100 - protein, 1208 aa, Artificial Sequence
  Description of Artificial Sequence: Synthetic polypeptide
MFVFLVLLPLVSSQCVNLTTRTQLPPAYTNSFTRGVYYPDKVFRSSVLHSTQDLFLPFFSNVTWFHAIHVSGTNGTKRFDNPVLPFNDGVYFASTEKSNIIRGWIFGTTLDSKTQSLLIVNNATNVVIKVCEFQFCNDPFLGVYYHKNNKSWMESEFRVYSSANNCTFEYVSQPFLMDLEGKQGNFKNLREFVFKNIDGYFKIYSKHTPINLVRDLPQGFSALEPLVDLPIGINITRFQTLLALHRSYLTPGDSSCGWTAGAAAYYVGYLQPRTFLLKYNENGTITDAVDCALDPLSETKCTLKSFTVEKGIYQTSNFRVQPTESIVRFPNITNLCPFGEVFNATRFASVYAWNRKRISNCVADYSVLYNSASFSTFKCYGVSPTKLNDLCFTNVYADSFVIRGDEVRQIAPGQTGKIADYNYKLPDDFTGCVIAWNSNNLDSKVGGNYNYLYRLFRKSNLKPFERDISTEIYQAGSTPCNGVEGFNCYFPLQSYGFQPTNGVGYQPYRVVVLSFELLHAPATVCGPKKSTNLVKNKCVNFNFNGLTGTGVLTESNKKFLPFQQFGRDIADTTDAVRDPQTLEILDITPCSFGGVSVITPGTNTSNQVAVLYQDVNCTEVPVAIHADQLTPTWRVYSTGSNVFQTRAGCLIGAEHVNNSYECDIPIGACICASYQTQTNSPGSASSVASQSIIAYTMSLGAENSVAYSNNSIAIPTNFTISVTTEILPVSMTKISVDCTMYICGDSTECSNLLLQYGSFCTQLNRALTGIAVEQDKNTQEVFAQVKQIYKTPPIKDFGGFNFSQILPDPSKPSKRSFIEDLLFNKVTLADAGFIKQYGDCLGDIAARDLICAQKFNGLTVLPPLLCDEMIAQYTSALLAGTITSGWTFGAGAALQIPFAMQMAYRFLGIGVTINVLYENQKLIANQFNSAIGKIQDSLSSTASALGKLQDVVNQNAQALNTLVKQLSSNFGAISSVLNDILSRLCPPEAEVQIDRLITGRLQSLQTYVTQLLIRAAEIRASANLAATKMSECVLGQSKRVDFCGKGYHLMSFPQSAPHGVVFLHVTYVPAQEKNFTTAPAICHDGKAHFPRIGVFVSNGTHWFVTQRNFYEPQIITTDNTFVSGNCDVVIGIVNNTVYDPLQPELDSFKEELDKYFKNHTSPDVDLGDISGINASVVNIQKEIDRLNEVAKNLNESLIDLQELGKYEQ

SEQ ID NO: 101 - DNA, 3744 bp, Artificial Sequence
  Description of Artificial Sequence: Synthetic polynucleotide
atggattctaagggcagcagccagaagggctccagactgctgctgcttctggtggtgtccaacctcctgctgcctcaaggtgttctggcccagtgtgtgaacctgaccacaagaacccagctgcctccagcctacaccaacagctttaccagaggcgtgtactaccccgacaaggtgttcagatccagcgtgctgcactctacccaggacctgttcctgcctttcttcagcaacgtgacctggttccacgccatccacgtgtccggcaccaatggcaccaagagattcgacaaccccgtgctgcccttcaacgacggggtgtactttgccagcaccgagaagtccaacatcatcagaggctggatcttcggcaccacactggacagcaagacccagagcctgctgatcgtgaacaacgccaccaacgtggtcatcaaagtgtgcgagttccagttctgcaacgaccccttcctgggcgtctactatcacaagaacaacaagagctggatggaaagcgagttccgggtgtacagcagcgccaacaactgcaccttcgagtacgtgtcccagcctttcctgatggacctggaaggcaagcagggcaacttcaagaacctgcgcgagttcgtgttcaagaacatcgacggctacttcaagatctacagcaagcacacccctatcaacctcgtgcgggatctgcctcagggcttctctgctctggaacccctggtggatctgcccatcggcatcaacatcacccggtttcagacactgctggccctgcacagaagctacctgacacctggcgatagcagcagcggatggacagctggtgccgccgcttactatgtgggctacctgcagcctagaaccttcctgctgaagtacaacgagaacggcaccatcaccgacgccgtggattgtgcccttgatcctctgagcgagacaaagtgcaccctgaagtccttcaccgtggaaaagggcatctaccagaccagcaacttccgggtgcagcccaccgaatccatcgtgcggttccccaatatcaccaatctgtgccccttcggcgaggtgttcaatgccaccagattcgcctctgtgtacgcctggaaccggaagcggatcagcaattgcgtggccgactactccgtgctgtacaactccgccagcttcagcaccttcaagtgctacggcgtgtcccctaccaagctgaacgacctgtgcttcacaaacgtgtacgccgacagcttcgtgatccggggagatgaagtgcggcagattgcccctggacagacaggcaagatcgccgactacaactacaagctgcccgacgacttcaccggctgtgtgattgcctggaacagcaacaacctggactccaaagtcggcggcaactacaattacctgtaccggctgttccggaagtccaatctgaagcccttcgagcgggacatctccaccgagatctatcaggccggcagcaccccttgtaacggcgtggaaggcttcaactgctacttcccactgcagtcctacggctttcagcccacaaatggcgtgggctatcagccctacagagtggtggtgctgagcttcgaactgctgcatgcccctgccacagtgtgcggccctaagaaaagcaccaatctcgtgaagaacaaatgcgtgaacttcaacttcaacggcctgaccggcaccggcgtgctgacagagagcaacaagaagttcctgccattccagcagtttggccgggatatcgccgataccacagacgccgttagagatccccagacactggaaatcctggacatcaccccttgcagcttcggcggagtgtctgtgatcacccctggcaccaacaccagcaatcaggtggcagtgctgtaccaggacgtgaactgtaccgaagtgcccgtggccattcacgccgatcagctgacacctacatggcgggtgtactccaccggcagcaatgtgtttcagaccagagccggctgtctgatcggagccgagcacgtgaacaatagctacgagtgcgacatccccatcggcgctggcatctgtgccagctaccagacacagacaaacagccccagacgggccagatctgtggccagccagagcatcattgcctacacaatgtctctgggcgccgagaacagcgtggcctactccaacaactctatcgctatccccaccaacttcaccatcagcgtgaccacagagatcctgcctgtgtccatgaccaagaccagcgtggactgcaccatgtacatctgcggcgattccaccgagtgctccaacctgctgctgcagtacggcagcttctgcacccagctgaatagagccctgacagggatcgccgtggaacaggacaagaacacccaagaggtgttcgcccaagtgaagcagatctacaagacccctcctatcaaggacttcggcggcttcaatttcagccagattctgcccgatcctagcaagcccagcaagcggagcttcatcgaggacctgctgttcaacaaagtgacactggccgacgccggcttcatcaagcagtatggcgattgtctgggcgacattgccgccagggatctgatttgcgcccagaagtttaacggactgacagtgctgccaccactgctgaccgatgagatgatcgcccagtacacatctgccctgctggccggcacaatcacaagcggctggacatttggagctggcgccgctctgcagatcccctttgctatgcagatggcctaccggttcaacggcatcggagtgacccagaatgtgctgtacgagaaccagaagctgatcgccaaccagttcaacagcgccatcggcaagatccaggacagcctgagcagcacagcaagcgccctgggaaagctgcaggacgtggtcaaccagaatgcccaggcactgaacaccctggtcaagcagctgtcctccaacttcggcgccatcagctctgtgctgaacgatatcctgagcagactggacaaggtggaagccgaggtgcagatcgacagactgatcaccggaaggctgcagtccctgcagacctacgttacccagcagctgatcagagccgccgagattagagcctctgccaatctggccgccaccaagatgtctgagtgtgtgctgggccagagcaagagagtggacttttgcggcaagggctaccacctgatgagcttccctcagtctgcccctcacggcgtggtgtttctgcacgtgacatacgtgcccgctcaagagaagaatttcaccaccgctccagccatctgccacgacggcaaagcccactttcctagagaaggcgtgttcgtgtccaacggcacccattggttcgtgacccagcggaacttctacgagccccagatcatcaccaccgacaacaccttcgtgtctggcaactgcgacgtcgtgatcggcattgtgaacaataccgtgtacgaccctctgcagcccgagctggacagcttcaaagaggaactggataagtactttaagaaccacacaagccccgacgtggacctgggcgatatcagcggaatcaatgccagcgtcgtgaacatccagaaagagatcgaccggctgaacgaggtggccaagaatctgaacgagagcctgatcgacctgcaagaactggggaagtacgagcagtacatcaagctggaagtgctgtttcaaggccctggctctcaccaccaccatcaccactgatgaggatcc

SEQ ID NO: 102 - DNA, 3720 bp, Artificial Sequence
  Description of Artificial Sequence: Synthetic polynucleotide
atgtttctgctgaccaccaagcggaccatgttcgtgtttctggtgctgctgcctctggtgtccagccagtgtgtgaacctgaccacaagaacccagctgcctccagcctacaccaacagctttaccagaggcgtgtactaccccgacaaggtgttcagatccagcgtgctgcactctacccaggacctgttcctgcctttcttcagcaacgtgacctggttccacgccatccacgtgtccggcaccaatggcaccaagagattcgacaaccccgtgctgcccttcaacgacggggtgtactttgccagcaccgagaagtccaacatcatcagaggctggatcttcggcaccacactggacagcaagacccagagcctgctgatcgtgaacaacgccaccaacgtggtcatcaaagtgtgcgagttccagttctgcaacgaccccttcctgggcgtctactatcacaagaacaacaagagctggatggaaagcgagttccgggtgtacagcagcgccaacaactgcaccttcgagtacgtgtcccagcctttcctgatggacctggaaggcaagcagggcaacttcaagaacctgcgcgagttcgtgttcaagaacatcgacggctacttcaagatctacagcaagcacacccctatcaacctcgtgcgggatctgcctcagggcttctctgctctggaacccctggtggatctgcccatcggcatcaacatcacccggtttcagacactgctggccctgcacagaagctacctgacacctggcgatagcagcagcggatggacagctggtgccgccgcttactatgtgggctacctgcagcctagaaccttcctgctgaagtacaacgagaacggcaccatcaccgacgccgtggattgtgcccttgatcctctgagcgagacaaagtgcaccctgaagtccttcaccgtggaaaagggcatctaccagaccagcaacttccgggtgcagcccaccgaatccatcgtgcggttccccaatatcaccaatctgtgccccttcggcgaggtgttcaatgccaccagattcgcctctgtgtacgcctggaaccggaagcggatcagcaattgcgtggccgactactccgtgctgtacaactccgccagcttcagcaccttcaagtgctacggcgtgtcccctaccaagctgaacgacctgtgcttcacaaacgtgtacgccgacagcttcgtgatccggggagatgaagtgcggcagattgcccctggacagacaggcaagatcgccgactacaactacaagctgcccgacgacttcaccggctgtgtgattgcctggaacagcaacaacctggactccaaagtcggcggcaactacaattacctgtaccggctgttccggaagtccaatctgaagcccttcgagcgggacatctccaccgagatctatcaggccggcagcaccccttgtaacggcgtggaaggcttcaactgctacttcccactgcagtcctacggctttcagcccacaaatggcgtgggctatcagccctacagagtggtggtgctgagcttcgaactgctgcatgcccctgccacagtgtgcggccctaagaaaagcaccaatctcgtgaagaacaaatgcgtgaacttcaacttcaacggcctgaccggcaccggcgtgctgacagagagcaacaagaagttcctgccattccagcagtttggccgggatatcgccgataccacagacgccgttagagatccccagacactggaaatcctggacatcaccccttgcagcttcggcggagtgtctgtgatcacccctggcaccaacaccagcaatcaggtggcagtgctgtaccaggacgtgaactgtaccgaagtgcccgtggccattcacgccgatcagctgacacctacatggcgggtgtactccaccggcagcaatgtgtttcagaccagagccggctgtctgatcggagccgagcacgtgaacaatagctacgagtgcgacatccccatcggcgctggcatctgtgccagctaccagacacagacaaacagccccagacgggccagatctgtggccagccagagcatcattgcctacacaatgtctctgggcgccgagaacagcgtggcctactccaacaactctatcgctatccccaccaacttcaccatcagcgtgaccacagagatcctgcctgtgtccatgaccaagaccagcgtggactgcaccatgtacatctgcggcgattccaccgagtgctccaacctgctgctgcagtacggcagcttctgcacccagctgaatagagccctgacagggatcgccgtggaacaggacaagaacacccaagaggtgttcgcccaagtgaagcagatctacaagacccctcctatcaaggacttcggcggcttcaatttcagccagattctgcccgatcctagcaagcccagcaagcggagcttcatcgaggacctgctgttcaacaaagtgacactggccgacgccggcttcatcaagcagtatggcgattgtctgggcgacattgccgccagggatctgatttgcgcccagaagtttaacggactgacagtgctgccaccactgctgaccgatgagatgatcgcccagtacacatctgccctgctggccggcacaatcacaagcggctggacatttggagctggcgccgctctgcagatcccctttgctatgcagatggcctaccggttcaacggcatcggagtgacccagaatgtgctgtacgagaaccagaagctgatcgccaaccagttcaacagcgccatcggcaagatccaggacagcctgagcagcacagcaagcgccctgggaaagctgcaggacgtggtcaaccagaatgcccaggcactgaacaccctggtcaagcagctgtcctccaacttcggcgccatcagctctgtgctgaacgatatcctgagcagactggacaaggtggaagccgaggtgcagatcgacagactgatcaccggaaggctgcagtccctgcagacctacgttacccagcagctgatcagagccgccgagattagagcctctgccaatctggccgccaccaagatgtctgagtgtgtgctgggccagagcaagagagtggacttttgcggcaagggctaccacctgatgagcttccctcagtctgcccctcacggcgtggtgtttctgcacgtgacatacgtgcccgctcaagagaagaatttcaccaccgctccagccatctgccacgacggcaaagcccactttcctagagaaggcgtgttcgtgtccaacggcacccattggttcgtgacccagcggaacttctacgagccccagatcatcaccaccgacaacaccttcgtgtctggcaactgcgacgtcgtgatcggcattgtgaacaataccgtgtacgaccctctgcagcccgagctggacagcttcaaagaggaactggataagtactttaagaaccacacaagccccgacgtggacctgggcgatatcagcggaatcaatgccagcgtcgtgaacatccagaaagagatcgaccggctgaacgaggtggccaagaatctgaacgagagcctgatcgacctgcaagaactggggaagtacgagcagtacatcaagctggaagtgctgtttcaaggccctggctctcaccaccaccatcaccactgatgaggatcc

SEQ ID NO: 103 - DNA, 3744 bp, Artificial Sequence
  Description of Artificial Sequence: Synthetic polynucleotide
atggattctaagggcagcagccagaagggctccagactgctgctgcttctggtggtgtccaacctcctgctgcctcaaggtgttctggcccagtgtgtgaacctgaccacaagaacccagctgcctccagcctacaccaacagctttaccagaggcgtgtactaccccgacaaggtgttcagatccagcgtgctgcactctacccaggacctgttcctgcctttcttcagcaacgtgacctggttccacgccatccacgtgtccggcaccaatggcaccaagagattcgacaaccccgtgctgcccttcaacgacggggtgtactttgccagcaccgagaagtccaacatcatcagaggctggatcttcggcaccacactggacagcaagacccagagcctgctgatcgtgaacaacgccaccaacgtggtcatcaaagtgtgcgagttccagttctgcaacgaccccttcctgggcgtctactatcacaagaacaacaagagctggatggaaagcgagttccgggtgtacagcagcgccaacaactgcaccttcgagtacgtgtcccagcctttcctgatggacctggaaggcaagcagggcaacttcaagaacctgcgcgagttcgtgttcaagaacatcgacggctacttcaagatctacagcaagcacacccctatcaacctcgtgcgggatctgcctcagggcttctctgctctggaacccctggtggatctgcccatcggcatcaacatcacccggtttcagacactgctggccctgcacagaagctacctgacacctggcgatagcagcagcggatggacagctggtgccgccgcttactatgtgggctacctgcagcctagaaccttcctgctgaagtacaacgagaacggcaccatcaccgacgccgtggattgtgcccttgatcctctgagcgagacaaagtgcaccctgaagtccttcaccgtggaaaagggcatctaccagaccagcaacttccgggtgcagcccaccgaatccatcgtgcggttccccaatatcaccaatctgtgccccttcggcgaggtgttcaatgccaccagattcgcctctgtgtacgcctggaaccggaagcggatcagcaattgcgtggccgactactccgtgctgtacaactccgccagcttcagcaccttcaagtgctacggcgtgtcccctaccaagctgaacgacctgtgcttcacaaacgtgtacgccgacagcttcgtgatccggggagatgaagtgcggcagattgcccctggacagacaggcaagatcgccgactacaactacaagctgcccgacgacttcaccggctgtgtgattgcctggaacagcaacaacctggactccaaagtcggcggcaactacaattacctgtaccggctgttccggaagtccaatctgaagcccttcgagcgggacatctccaccgagatctatcaggccggcagcaccccttgtaacggcgtggaaggcttcaactgctacttcccactgcagtcctacggctttcagcccacaaatggcgtgggctatcagccctacagagtggtggtgctgagcttcgaactgctgcatgcccctgccacagtgtgcggccctaagaaaagcaccaatctcgtgaagaacaaatgcgtgaacttcaacttcaacggcctgaccggcaccggcgtgctgacagagagcaacaagaagttcctgccattccagcagtttggccgggatatcgccgataccacagacgccgttagagatccccagacactggaaatcctggacatcaccccttgcagcttcggcggagtgtctgtgatcacccctggcaccaacaccagcaatcaggtggcagtgctgtaccaggacgtgaactgtaccgaagtgcccgtggccattcacgccgatcagctgacacctacatggcgggtgtactccaccggcagcaatgtgtttcagaccagagccggctgtctgatcggagccgagcacgtgaacaatagctacgagtgcgacatccccatcggcgctggcatctgtgccagctaccagacacagacaaacagccccagacgggccagatctgtggcctctcaatctatcggcggaggctctggatctctgggcgccgaaaattccgtggcctactccaacaactctatcgctatccccaccaacttcaccatcagcgtgaccacagagatcctgcctgtgtccatgaccaagaccagcgtggactgcaccatgtacatctgcggcgattccaccgagtgctccaacctgctgctgcagtacggcagcttctgcacccagctgaatagagccctgacagggatcgccgtggaacaggacaagaacacccaagaggtgttcgcccaagtgaagcagatctacaagacccctcctatcaaggacttcggcggcttcaatttcagccagattctgcccgatcctagcggaggcggcagcggctcttttatcgaggacctgctgttcaacaaagtgacactggccgacgccggcttcatcaagcagtatggcgattgtctgggcgacattgccgccagggatctgatttgcgcccagaagtttaacggactgacagtgctgccaccactgctgaccgatgagatgatcgcccagtacacatctgccctgctggccggcacaatcacaagcggctggacatttggagctggcgccgctctgcagatcccctttgctatgcagatggcctaccggttcaacggcatcggagtgacccagaatgtgctgtacgagaaccagaagctgatcgccaaccagttcaacagcgccatcggcaagatccaggacagcctgagcagcacagcaagcgccctgggaaagctgcaggacgtggtcaaccagaatgcccaggcactgaacaccctggtcaagcagctgtcctccaacttcggcgccatcagctctgtgctgaacgatatcctgagcagactggacaaggtggaagccgaggtgcagatcgacagactgatcaccggaaggctgcagtccctgcagacctacgttacccagcagctgatcagagccgccgagattagagcctctgccaatctggccgccaccaagatgtctgagtgtgtgctgggccagagcaagagagtggacttttgcggcaagggctaccacctgatgagcttccctcagtctgcccctcacggcgtggtgtttctgcacgtgacatacgtgcccgctcaagagaagaatttcaccaccgctccagccatctgccacgacggcaaagcccactttcctagagaaggcgtgttcgtgtccaacggcacccattggttcgtgacccagcggaacttctacgagccccagatcatcaccaccgacaacaccttcgtgtctggcaactgcgacgtcgtgatcggcattgtgaacaataccgtgtacgaccctctgcagcccgagctggacagcttcaaagaggaactggataagtactttaagaaccacacaagccccgacgtggacctgggcgatatcagcggaatcaatgccagcgtcgtgaacatccagaaagagatcgaccggctgaacgaggtggccaagaatctgaacgagagcctgatcgacctgcaagaactggggaagtacgagcagtacatcaagctggaagtgctgtttcaaggccctggctctcaccaccaccatcaccactgatgaggatcc

SEQ ID NO: 104 - DNA, 3720 bp, Artificial Sequence
  Description of Artificial Sequence: Synthetic polynucleotide
atgtttctgctgaccaccaagcggaccatgttcgtgtttctggtgctgctgcctctggtgtccagccagtgtgtgaacctgaccacaagaacccagctgcctccagcctacaccaacagctttaccagaggcgtgtactaccccgacaaggtgttcagatccagcgtgctgcactctacccaggacctgttcctgcctttcttcagcaacgtgacctggttccacgccatccacgtgtccggcaccaatggcaccaagagattcgacaaccccgtgctgcccttcaacgacggggtgtactttgccagcaccgagaagtccaacatcatcagaggctggatcttcggcaccacactggacagcaagacccagagcctgctgatcgtgaacaacgccaccaacgtggtcatcaaagtgtgcgagttccagttctgcaacgaccccttcctgggcgtctactatcacaagaacaacaagagctggatggaaagcgagttccgggtgtacagcagcgccaacaactgcaccttcgagtacgtgtcccagcctttcctgatggacctggaaggcaagcagggcaacttcaagaacctgcgcgagttcgtgttcaagaacatcgacggctacttcaagatctacagcaagcacacccctatcaacctcgtgcgggatctgcctcagggcttctctgctctggaacccctggtggatctgcccatcggcatcaacatcacccggtttcagacactgctggccctgcacagaagctacctgacacctggcgatagcagcagcggatggacagctggtgccgccgcttactatgtgggctacctgcagcctagaaccttcctgctgaagtacaacgagaacggcaccatcaccgacgccgtggattgtgcccttgatcctctgagcgagacaaagtgcaccctgaagtccttcaccgtggaaaagggcatctaccagaccagcaacttccgggtgcagcccaccgaatccatcgtgcggttccccaatatcaccaatctgtgccccttcggcgaggtgttcaatgccaccagattcgcctctgtgtacgcctggaaccggaagcggatcagcaattgcgtggccgactactccgtgctgtacaactccgccagcttcagcaccttcaagtgctacggcgtgtcccctaccaagctgaacgacctgtgcttcacaaacgtgtacgccgacagcttcgtgatccggggagatgaagtgcggcagattgcccctggacagacaggcaagatcgccgactacaactacaagctgcccgacgacttcaccggctgtgtgattgcctggaacagcaacaacctggactccaaagtcggcggcaactacaattacctgtaccggctgttccggaagtccaatctgaagcccttcgagcgggacatctccaccgagatctatcaggccggcagcaccccttgtaacggcgtggaaggcttcaactgctacttcccactgcagtcctacggctttcagcccacaaatggcgtgggctatcagccctacagagtggtggtgctgagcttcgaactgctgcatgcccctgccacagtgtgcggccctaagaaaagcaccaatctcgtgaagaacaaatgcgtgaacttcaacttcaacggcctgaccggcaccggcgtgctgacagagagcaacaagaagttcctgccattccagcagtttggccgggatatcgccgataccacagacgccgttagagatccccagacactggaaatcctggacatcaccccttgcagcttcggcggagtgtctgtgatcacccctggcaccaacaccagcaatcaggtggcagtgctgtaccaggacgtgaactgtaccgaagtgcccgtggccattcacgccgatcagctgacacctacatggcgggtgtactccaccggcagcaatgtgtttcagaccagagccggctgtctgatcggagccgagcacgtgaacaatagctacgagtgcgacatccccatcggcgctggcatctgtgccagctaccagacacagacaaacagccccagacgggccagatctgtggcctctcaatctatcggcggaggctctggatctctgggcgccgaaaattccgtggcctactccaacaactctatcgctatccccaccaacttcaccatcagcgtgaccacagagatcctgcctgtgtccatgaccaagaccagcgtggactgcaccatgtacatctgcggcgattccaccgagtgctccaacctgctgctgcagtacggcagcttctgcacccagctgaatagagccctgacagggatcgccgtggaacaggacaagaacacccaagaggtgttcgcccaagtgaagcagatctacaagacccctcctatcaaggacttcggcggcttcaatttcagccagattctgcccgatcctagcggaggcggcagcggctcttttatcgaggacctgctgttcaacaaagtgacactggccgacgccggcttcatcaagcagtatggcgattgtctgggcgacattgccgccagggatctgatttgcgcccagaagtttaacggactgacagtgctgccaccactgctgaccgatgagatgatcgcccagtacacatctgccctgctggccggcacaatcacaagcggctggacatttggagctggcgccgctctgcagatcccctttgctatgcagatggcctaccggttcaacggcatcggagtgacccagaatgtgctgtacgagaaccagaagctgatcgccaaccagttcaacagcgccatcggcaagatccaggacagcctgagcagcacagcaagcgccctgggaaagctgcaggacgtggtcaaccagaatgcccaggcactgaacaccctggtcaagcagctgtcctccaacttcggcgccatcagctctgtgctgaacgatatcctgagcagactggacaaggtggaagccgaggtgcagatcgacagactgatcaccggaaggctgcagtccctgcagacctacgttacccagcagctgatcagagccgccgagattagagcctctgccaatctggccgccaccaagatgtctgagtgtgtgctgggccagagcaagagagtggacttttgcggcaagggctaccacctgatgagcttccctcagtctgcccctcacggcgtggtgtttctgcacgtgacatacgtgcccgctcaagagaagaatttcaccaccgctccagccatctgccacgacggcaaagcccactttcctagagaaggcgtgttcgtgtccaacggcacccattggttcgtgacccagcggaacttctacgagccccagatcatcaccaccgacaacaccttcgtgtctggcaactgcgacgtcgtgatcggcattgtgaacaataccgtgtacgaccctctgcagcccgagctggacagcttcaaagaggaactggataagtactttaagaaccacacaagccccgacgtggacctgggcgatatcagcggaatcaatgccagcgtcgtgaacatccagaaagagatcgaccggctgaacgaggtggccaagaatctgaacgagagcctgatcgacctgcaagaactggggaagtacgagcagtacatcaagctggaagtgctgtttcaaggccctggctctcaccaccaccatcaccactgatgaggatcc

SEQ ID NO: 105 - DNA, 3858 bp, Artificial Sequence
  Description of Artificial Sequence: Synthetic polynucleotide
atgtttctgctgaccaccaagcggaccatgttcgtgtttctggtgctgctgcctctggtgtccagccagtgtgtgaacctgaccacaagaacccagctgcctccagcctacaccaacagctttaccagaggcgtgtactaccccgacaaggtgttcagatccagcgtgctgcactctacccaggacctgttcctgcctttcttcagcaacgtgacctggttccacgccatccacgtgtccggcaccaatggcaccaagagattcgacaaccccgtgctgcccttcaacgacggggtgtactttgccagcaccgagaagtccaacatcatcagaggctggatcttcggcaccacactggacagcaagacccagagcctgctgatcgtgaacaacgccaccaacgtggtcatcaaagtgtgcgagttccagttctgcaacgaccccttcctgggcgtctactatcacaagaacaacaagagctggatggaaagcgagttccgggtgtacagcagcgccaacaactgcaccttcgagtacgtgtcccagcctttcctgatggacctggaaggcaagcagggcaacttcaagaacctgcgcgagttcgtgttcaagaacatcgacggctacttcaagatctacagcaagcacacccctatcaacctcgtgcgggatctgcctcagggcttctctgctctggaacccctggtggatctgcccatcggcatcaacatcacccggtttcagacactgctggccctgcacagaagctacctgacacctggcgatagcagcagcggatggacagctggtgccgccgcttactatgtgggctacctgcagcctagaaccttcctgctgaagtacaacgagaacggcaccatcaccgacgccgtggattgtgcccttgatcctctgagcgagacaaagtgcaccctgaagtccttcaccgtggaaaagggcatctaccagaccagcaacttccgggtgcagcccaccgaatccatcgtgcggttccccaatatcaccaatctgtgccccttcggcgaggtgttcaatgccaccagattcgcctctgtgtacgcctggaaccggaagcggatcagcaattgcgtggccgactactccgtgctgtacaactccgccagcttcagcaccttcaagtgctacggcgtgtcccctaccaagctgaacgacctgtgcttcacaaacgtgtacgccgacagcttcgtgatccggggagatgaagtgcggcagattgcccctggacagacaggcaagatcgccgactacaactacaagctgcccgacgacttcaccggctgtgtgattgcctggaacagcaacaacctggactccaaagtcggcggcaactacaattacctgtaccggctgttccggaagtccaatctgaagcccttcgagcgggacatctccaccgagatctatcaggccggcagcaccccttgtaacggcgtggaaggcttcaactgctacttcccactgcagtcctacggctttcagcccacaaatggcgtgggctatcagccctacagagtggtggtgctgagcttcgaactgctgcatgcccctgccacagtgtgcggccctaagaaaagcaccaatctcgtgaagaacaaatgcgtgaacttcaacttcaacggcctgaccggcaccggcgtgctgacagagagcaacaagaagttcctgccattccagcagtttggccgggatatcgccgataccacagacgccgttagagatccccagacactggaaatcctggacatcaccccttgcagcttcggcggagtgtctgtgatcacccctggcaccaacaccagcaatcaggtggcagtgctgtaccaggacgtgaactgtaccgaagtgcccgtggccattcacgccgatcagctgacacctacatggcgggtgtactccaccggcagcaatgtgtttcagaccagagccggctgtctgatcggagccgagcacgtgaacaatagctacgagtgcgacatccccatcggcgctggcatctgtgccagctaccagacacagacaaacagccccagacgggccagatctgtggccagccagagcatcattgcctacacaatgtctctgggcgccgagaacagcgtggcctactccaacaactctatcgctatccccaccaacttcaccatcagcgtgaccacagagatcctgcctgtgtccatgaccaagaccagcgtggactgcaccatgtacatctgcggcgattccaccgagtgctccaacctgctgctgcagtacggcagcttctgcacccagctgaatagagccctgacagggatcgccgtggaacaggacaagaacacccaagaggtgttcgcccaagtgaagcagatctacaagacccctcctatcaaggacttcggcggcttcaatttcagccagattctgcccgatcctagcaagcccagcaagcggagcttcatcgaggacctgctgttcaacaaagtgacactggccgacgccggcttcatcaagcagtatggcgattgtctgggcgacattgccgccagggatctgatttgcgcccagaagtttaacggactgacagtgctgccaccactgctgaccgatgagatgatcgcccagtacacatctgccctgctggccggcacaatcacaagcggctggacatttggagctggcgccgctctgcagatcccctttgctatgcagatggcctaccggttcaacggcatcggagtgacccagaatgtgctgtacgagaaccagaagctgatcgccaaccagttcaacagcgccatcggcaagatccaggacagcctgagcagcacagcaagcgccctgggaaagctgcaggacgtggtcaaccagaatgcccaggcactgaacaccctggtcaagcagctgtcctccaacttcggcgccatcagctctgtgctgaacgatatcctgagcagactggacaaggtggaagccgaggtgcagatcgacagactgatcaccggaaggctgcagtccctgcagacctacgttacccagcagctgatcagagccgccgagattagagcctctgccaatctggccgccaccaagatgtctgagtgtgtgctgggccagagcaagagagtggacttttgcggcaagggctaccacctgatgagcttccctcagtctgcccctcacggcgtggtgtttctgcacgtgacatacgtgcccgctcaagagaagaatttcaccaccgctccagccatctgccacgacggcaaagcccactttcctagagaaggcgtgttcgtgtccaacggcacccattggttcgtgacccagcggaacttctacgagccccagatcatcaccaccgacaacaccttcgtgtctggcaactgcgacgtcgtgatcggcattgtgaacaataccgtgtacgaccctctgcagcccgagctggacagcttcaaagaggaactggataagtactttaagaaccacacaagccccgacgtggacctgggcgatatcagcggaatcaatgccagcgtcgtgaacatccagaaagagatcgaccggctgaacgaggtggccaagaatctgaacgagagcctgatcgacctgcaagaactggggaagtacgagcagtacatcaagtggccctggtacatctggctgggctttatcgccggactgattgccatcgtgatggtcacaatcatgctgtgttgcatgaccagctgctgtagctgcctgaagggctgttgtagctgtggcagctgctgcaagttcgacgaggacgattctgagcccgtgctgaagggcgtgaaactgcactacacatgatgaggatcc

SEQ ID NO: 106 - DNA, 3882 bp, Artificial Sequence
  Description of Artificial Sequence: Synthetic polynucleotide
atggattctaagggcagcagccagaagggctccagactgctgctgcttctggtggtgtccaacctcctgctgcctcaaggtgttctggcccagtgtgtgaacctgaccacaagaacccagctgcctccagcctacaccaacagctttaccagaggcgtgtactaccccgacaaggtgttcagatccagcgtgctgcactctacccaggacctgttcctgcctttcttcagcaacgtgacctggttccacgccatccacgtgtccggcaccaatggcaccaagagattcgacaaccccgtgctgcccttcaacgacggggtgtactttgccagcaccgagaagtccaacatcatcagaggctggatcttcggcaccacactggacagcaagacccagagcctgctgatcgtgaacaacgccaccaacgtggtcatcaaagtgtgcgagttccagttctgcaacgaccccttcctgggcgtctactatcacaagaacaacaagagctggatggaaagcgagttccgggtgtacagcagcgccaacaactgcaccttcgagtacgtgtcccagcctttcctgatggacctggaaggcaagcagggcaacttcaagaacctgcgcgagttcgtgttcaagaacatcgacggctacttcaagatctacagcaagcacacccctatcaacctcgtgcgggatctgcctcagggcttctctgctctggaacccctggtggatctgcccatcggcatcaacatcacccggtttcagacactgctggccctgcacagaagctacctgacacctggcgatagcagcagcggatggacagctggtgccgccgcttactatgtgggctacctgcagcctagaaccttcctgctgaagtacaacgagaacggcaccatcaccgacgccgtggattgtgcccttgatcctctgagcgagacaaagtgcaccctgaagtccttcaccgtggaaaagggcatctaccagaccagcaacttccgggtgcagcccaccgaatccatcgtgcggttccccaatatcaccaatctgtgccccttcggcgaggtgttcaatgccaccagattcgcctctgtgtacgcctggaaccggaagcggatcagcaattgcgtggccgactactccgtgctgtacaactccgccagcttcagcaccttcaagtgctacggcgtgtcccctaccaagctgaacgacctgtgcttcacaaacgtgtacgccgacagcttcgtgatccggggagatgaagtgcggcagattgcccctggacagacaggcaagatcgccgactacaactacaagctgcccgacgacttcaccggctgtgtgattgcctggaacagcaacaacctggactccaaagtcggcggcaactacaattacctgtaccggctgttccggaagtccaatctgaagcccttcgagcgggacatctccaccgagatctatcaggccggcagcaccccttgtaacggcgtggaaggcttcaactgctacttcccactgcagtcctacggctttcagcccacaaatggcgtgggctatcagccctacagagtggtggtgctgagcttcgaactgctgcatgcccctgccacagtgtgcggccctaagaaaagcaccaatctcgtgaagaacaaatgcgtgaacttcaacttcaacggcctgaccggcaccggcgtgctgacagagagcaacaagaagttcctgccattccagcagtttggccgggatatcgccgataccacagacgccgttagagatccccagacactggaaatcctggacatcaccccttgcagcttcggcggagtgtctgtgatcacccctggcaccaacaccagcaatcaggtggcagtgctgtaccaggacgtgaactgtaccgaagtgcccgtggccattcacgccgatcagctgacacctacatggcgggtgtactccaccggcagcaatgtgtttcagaccagagccggctgtctgatcggagccgagcacgtgaacaatagctacgagtgcgacatccccatcggcgctggcatctgtgccagctaccagacacagacaaacagccccagacgggccagatctgtggccagccagagcatcattgcctacacaatgtctctgggcgccgagaacagcgtggcctactccaacaactctatcgctatccccaccaacttcaccatcagcgtgaccacagagatcctgcctgtgtccatgaccaagaccagcgtggactgcaccatgtacatctgcggcgattccaccgagtgctccaacctgctgctgcagtacggcagcttctgcacccagctgaatagagccctgacagggatcgccgtggaacaggacaagaacacccaagaggtgttcgcccaagtgaagcagatctacaagacccctcctatcaaggacttcggcggcttcaatttcagccagattctgcccgatcctagcaagcccagcaagcggagcttcatcgaggacctgctgttcaacaaagtgacactggccgacgccggcttcatcaagcagtatggcgattgtctgggcgacattgccgccagggatctgatttgcgcccagaagtttaacggactgacagtgctgccaccactgctgaccgatgagatgatcgcccagtacacatctgccctgctggccggcacaatcacaagcggctggacatttggagctggcgccgctctgcagatcccctttgctatgcagatggcctaccggttcaacggcatcggagtgacccagaatgtgctgtacgagaaccagaagctgatcgccaaccagttcaacagcgccatcggcaagatccaggacagcctgagcagcacagcaagcgccctgggaaagctgcaggacgtggtcaaccagaatgcccaggcactgaacaccctggtcaagcagctgtcctccaacttcggcgccatcagctctgtgctgaacgatatcctgagcagactggacaaggtggaagccgaggtgcagatcgacagactgatcaccggaaggctgcagtccctgcagacctacgttacccagcagctgatcagagccgccgagattagagcctctgccaatctggccgccaccaagatgtctgagtgtgtgctgggccagagcaagagagtggacttttgcggcaagggctaccacctgatgagcttccctcagtctgcccctcacggcgtggtgtttctgcacgtgacatacgtgcccgctcaagagaagaatttcaccaccgctccagccatctgccacgacggcaaagcccactttcctagagaaggcgtgttcgtgtccaacggcacccattggttcgtgacccagcggaacttctacgagccccagatcatcaccaccgacaacaccttcgtgtctggcaactgcgacgtcgtgatcggcattgtgaacaataccgtgtacgaccctctgcagcccgagctggacagcttcaaagaggaactggataagtactttaagaaccacacaagccccgacgtggacctgggcgatatcagcggaatcaatgccagcgtcgtgaacatccagaaagagatcgaccggctgaacgaggtggccaagaatctgaacgagagcctgatcgacctgcaagaactggggaagtacgagcagtacatcaagtggccctggtacatctggctgggctttatcgccggactgattgccatcgtgatggtcacaatcatgctgtgttgcatgaccagctgctgtagctgcctgaagggctgttgtagctgtggcagctgctgcaagttcgacgaggacgattctgagcccgtgctgaagggcgtgaaactgcactacacatgatgaggatcc

SEQ ID NO: 107 - DNA, 3858 bp, Artificial Sequence
  Description of Artificial Sequence: Synthetic polynucleotide
atgtttctgctgaccaccaagcggaccatgttcgtgtttctggtgctgctgcctctggtgtccagccagtgtgtgaacctgaccacaagaacccagctgcctccagcctacaccaacagctttaccagaggcgtgtactaccccgacaaggtgttcagatccagcgtgctgcactctacccaggacctgttcctgcctttcttcagcaacgtgacctggttccacgccatccacgtgtccggcaccaatggcaccaagagattcgacaaccccgtgctgcccttcaacgacggggtgtactttgccagcaccgagaagtccaacatcatcagaggctggatcttcggcaccacactggacagcaagacccagagcctgctgatcgtgaacaacgccaccaacgtggtcatcaaagtgtgcgagttccagttctgcaacgaccccttcctgggcgtctactatcacaagaacaacaagagctggatggaaagcgagttccgggtgtacagcagcgccaacaactgcaccttcgagtacgtgtcccagcctttcctgatggacctggaaggcaagcagggcaacttcaagaacctgcgcgagttcgtgttcaagaacatcgacggctacttcaagatctacagcaagcacacccctatcaacctcgtgcgggatctgcctcagggcttctctgctctggaacccctggtggatctgcccatcggcatcaacatcacccggtttcagacactgctggccctgcacagaagctacctgacacctggcgatagcagcagcggatggacagctggtgccgccgcttactatgtgggctacctgcagcctagaaccttcctgctgaagtacaacgagaacggcaccatcaccgacgccgtggattgtgcccttgatcctctgagcgagacaaagtgcaccctgaagtccttcaccgtggaaaagggcatctaccagaccagcaacttccgggtgcagcccaccgaatccatcgtgcggttccccaatatcaccaatctgtgccccttcggcgaggtgttcaatgccaccagattcgcctctgtgtacgcctggaaccggaagcggatcagcaattgcgtggccgactactccgtgctgtacaactccgccagcttcagcaccttcaagtgctacggcgtgtcccctaccaagctgaacgacctgtgcttcacaaacgtgtacgccgacagcttcgtgatccggggagatgaagtgcggcagattgcccctggacagacaggcaagatcgccgactacaactacaagctgcccgacgacttcaccggctgtgtgattgcctggaacagcaacaacctggactccaaagtcggcggcaactacaattacctgtaccggctgttccggaagtccaatctgaagcccttcgagcgggacatctccaccgagatctatcaggccggcagcaccccttgtaacggcgtggaaggcttcaactgctacttcccactgcagtcctacggctttcagcccacaaatggcgtgggctatcagccctacagagtggtggtgctgagcttcgaactgctgcatgcccctgccacagtgtgcggccctaagaaaagcaccaatctcgtgaagaacaaatgcgtgaacttcaacttcaacggcctgaccggcaccggcgtgctgacagagagcaacaagaagttcctgccattccagcagtttggccgggatatcgccgataccacagacgccgttagagatccccagacactggaaatcctggacatcaccccttgcagcttcggcggagtgtctgtgatcacccctggcaccaacaccagcaatcaggtggcagtgctgtaccaggacgtgaactgtaccgaagtgcccgtggccattcacgccgatcagctgacacctacatggcgggtgtactccaccggcagcaatgtgtttcagaccagagccggctgtctgatcggagccgagcacgtgaacaatagctacgagtgcgacatccccatcggcgctggcatctgtgccagctaccagacacagacaaacagccccagacgggccagatctgtggcctctcaatctatcggcggaggctctggatctctgggcgccgaaaattccgtggcctactccaacaactctatcgctatccccaccaacttcaccatcagcgtgaccacagagatcctgcctgtgtccatgaccaagaccagcgtggactgcaccatgtacatctgcggcgattccaccgagtgctccaacctgctgctgcagtacggcagcttctgcacccagctgaatagagccctgacagggatcgccgtggaacaggacaagaacacccaagaggtgttcgcccaagtgaagcagatctacaagacccctcctatcaaggacttcggcggcttcaatttcagccagattctgcccgatcctagcggaggcggcagcggctcttttatcgaggacctgctgttcaacaaagtgacactggccgacgccggcttcatcaagcagtatggcgattgtctgggcgacattgccgccagggatctgatttgcgcccagaagtttaacggactgacagtgctgccaccactgctgaccgatgagatgatcgcccagtacacatctgccctgctggccggcacaatcacaagcggctggacatttggagctggcgccgctctgcagatcccctttgctatgcagatggcctaccggttcaacggcatcggagtgacccagaatgtgctgtacgagaaccagaagctgatcgccaaccagttcaacagcgccatcggcaagatccaggacagcctgagcagcacagcaagcgccctgggaaagctgcaggacgtggtcaaccagaatgcccaggcactgaacaccctggtcaagcagctgtcctccaacttcggcgccatcagctctgtgctgaacgatatcctgagcagactggacaaggtggaagccgaggtgcagatcgacagactgatcaccggaaggctgcagtccctgcagacctacgttacccagcagctgatcagagccgccgagattagagcctctgccaatctggccgccaccaagatgtctgagtgtgtgctgggccagagcaagagagtggacttttgcggcaagggctaccacctgatgagcttccctcagtctgcccctcacggcgtggtgtttctgcacgtgacatacgtgcccgctcaagagaagaatttcaccaccgctccagccatctgccacgacggcaaagcccactttcctagagaaggcgtgttcgtgtccaacggcacccattggttcgtgacccagcggaacttctacgagccccagatcatcaccaccgacaacaccttcgtgtctggcaactgcgacgtcgtgatcggcattgtgaacaataccgtgtacgaccctctgcagcccgagctggacagcttcaaagaggaactggataagtactttaagaaccacacaagccccgacgtggacctgggcgatatcagcggaatcaatgccagcgtcgtgaacatccagaaagagatcgaccggctgaacgaggtggccaagaatctgaacgagagcctgatcgacctgcaagaactggggaagtacgagcagtacatcaagtggccctggtacatctggctgggctttatcgccggactgattgccatcgtgatggtcacaatcatgctgtgttgcatgaccagctgctgtagctgcctgaagggctgttgtagctgtggcagctgctgcaagttcgacgaggacgattctgagcccgtgctgaagggcgtgaaactgcactacacatgatgaggatcc

SEQ ID NO: 108 - DNA, 3882 bp, Artificial Sequence
  Description of Artificial Sequence: Synthetic polynucleotide
atggattctaagggcagcagccagaagggctccagactgctgctgcttctggtggtgtccaacctcctgctgcctcaaggtgttctggcccagtgtgtgaacctgaccacaagaacccagctgcctccagcctacaccaacagctttaccagaggcgtgtactaccccgacaaggtgttcagatccagcgtgctgcactctacccaggacctgttcctgcctttcttcagcaacgtgacctggttccacgccatccacgtgtccggcaccaatggcaccaagagattcgacaaccccgtgctgcccttcaacgacggggtgtactttgccagcaccgagaagtccaacatcatcagaggctggatcttcggcaccacactggacagcaagacccagagcctgctgatcgtgaacaacgccaccaacgtggtcatcaaagtgtgcgagttccagttctgcaacgaccccttcctgggcgtctactatcacaagaacaacaagagctggatggaaagcgagttccgggtgtacagcagcgccaacaactgcaccttcgagtacgtgtcccagcctttcctgatggacctggaaggcaagcagggcaacttcaagaacctgcgcgagttcgtgttcaagaacatcgacggctacttcaagatctacagcaagcacacccctatcaacctcgtgcgggatctgcctcagggcttctctgctctggaacccctggtggatctgcccatcggcatcaacatcacccggtttcagacactgctggccctgcacagaagctacctgacacctggcgatagcagcagcggatggacagctggtgccgccgcttactatgtgggctacctgcagcctagaaccttcctgctgaagtacaacgagaacggcaccatcaccgacgccgtggattgtgcccttgatcctctgagcgagacaaagtgcaccctgaagtccttcaccgtggaaaagggcatctaccagaccagcaacttccgggtgcagcccaccgaatccatcgtgcggttccccaatatcaccaatctgtgccccttcggcgaggtgttcaatgccaccagattcgcctctgtgtacgcctggaaccggaagcggatcagcaattgcgtggccgactactccgtgctgtacaactccgccagcttcagcaccttcaagtgctacggcgtgtcccctaccaagctgaacgacctgtgcttcacaaacgtgtacgccgacagcttcgtgatccggggagatgaagtgcggcagattgcccctggacagacaggcaagatcgccgactacaactacaagctgcccgacgacttcaccggctgtgtgattgcctggaacagcaacaacctggactccaaagtcggcggcaactacaattacctgtaccggctgttccggaagtccaatctgaagcccttcgagcgggacatctccaccgagatctatcaggccggcagcaccccttgtaacggcgtggaaggcttcaactgctacttcccactgcagtcctacggctttcagcccacaaatggcgtgggctatcagccctacagagtggtggtgctgagcttcgaactgctgcatgcccctgccacagtgtgcggccctaagaaaagcaccaatctcgtgaagaacaaatgcgtgaacttcaacttcaacggcctgaccggcaccggcgtgctgacagagagcaacaagaagttcctgccattccagcagtttggccgggatatcgccgataccacagacgccgttagagatccccagacactggaaatcctggacatcaccccttgcagcttcggcggagtgtctgtgatcacccctggcaccaacaccagcaatcaggtggcagtgctgtaccaggacgtgaactgtaccgaagtgcccgtggccattcacgccgatcagctgacacctacatggcgggtgtactccaccggcagcaatgtgtttcagaccagagccggctgtctgatcggagccgagcacgtgaacaatagctacgagtgcgacatccccatcggcgctggcatctgtgccagctaccagacacagacaaacagccccagacgggccagatctgtggcctctcaatctatcggcggaggctctggatctctgggcgccgaaaattccgtggcctactccaacaactctatcgctatccccaccaacttcaccatcagcgtgaccacagagatcctgcctgtgtccatgaccaagaccagcgtggactgcaccatgtacatctgcggcgattccaccgagtgctccaacctgctgctgcagtacggcagcttctgcacccagctgaatagagccctgacagggatcgccgtggaacaggacaagaacacccaagaggtgttcgcccaagtgaagcagatctacaagacccctcctatcaaggacttcggcggcttcaatttcagccagattctgcccgatcctagcggaggcggcagcggctcttttatcgaggacctgctgttcaacaaagtgacactggccgacgccggcttcatcaagcagtatggcgattgtctgggcgacattgccgccagggatctgatttgcgcccagaagtttaacggactgacagtgctgccaccactgctgaccgatgagatgatcgcccagtacacatctgccctgctggccggcacaatcacaagcggctggacatttggagctggcgccgctctgcagatcccctttgctatgcagatggcctaccggttcaacggcatcggagtgacccagaatgtgctgtacgagaaccagaagctgatcgccaaccagttcaacagcgccatcggcaagatccaggacagcctgagcagcacagcaagcgccctgggaaagctgcaggacgtggtcaaccagaatgcccaggcactgaacaccctggtcaagcagctgtcctccaacttcggcgccatcagctctgtgctgaacgatatcctgagcagactggacaaggtggaagccgaggtgcagatcgacagactgatcaccggaaggctgcagtccctgcagacctacgttacccagcagctgatcagagccgccgagattagagcctctgccaatctggccgccaccaagatgtctgagtgtgtgctgggccagagcaagagagtggacttttgcggcaagggctaccacctgatgagcttccctcagtctgcccctcacggcgtggtgtttctgcacgtgacatacgtgcccgctcaagagaagaatttcaccaccgctccagccatctgccacgacggcaaagcccactttcctagagaaggcgtgttcgtgtccaacggcacccattggttcgtgacccagcggaacttctacgagccccagatcatcaccaccgacaacaccttcgtgtctggcaactgcgacgtcgtgatcggcattgtgaacaataccgtgtacgaccctctgcagcccgagctggacagcttcaaagaggaactggataagtactttaagaaccacacaagccccgacgtggacctgggcgatatcagcggaatcaatgccagcgtcgtgaacatccagaaagagatcgaccggctgaacgaggtggccaagaatctgaacgagagcctgatcgacctgcaagaactggggaagtacgagcagtacatcaagtggccctggtacatctggctgggctttatcgccggactgattgccatcgtgatggtcacaatcatgctgtgttgcatgaccagctgctgtagctgcctgaagggctgttgtagctgtggcagctgctgcaagttcgacgaggacgattctgagcccgtgctgaagggcgtgaaactgcactacacatgatgaggatcc

SEQ ID NO: 109 - DNA, 3825 bp, Artificial Sequence
  Description of Artificial Sequence: Synthetic polynucleotide
atggattctaagggcagcagccagaagggctccagactgctgctgcttctggtggtgtccaacctcctgctgcctcaaggtgttctggcccagtgtgtgaacctgaccacaagaacccagctgcctccagcctacaccaacagctttaccagaggcgtgtactaccccgacaaggtgttcagatccagcgtgctgcactctacccaggacctgttcctgcctttcttcagcaacgtgacctggttccacgccatccacgtgtccggcaccaatggcaccaagagattcgacaaccccgtgctgcccttcaacgacggggtgtactttgccagcaccgagaagtccaacatcatcagaggctggatcttcggcaccacactggacagcaagacccagagcctgctgatcgtgaacaacgccaccaacgtggtcatcaaagtgtgcgagttccagttctgcaacgaccccttcctgggcgtctactatcacaagaacaacaagagctggatggaaagcgagttccgggtgtacagcagcgccaacaactgcaccttcgagtacgtgtcccagcctttcctgatggacctggaaggcaagcagggcaacttcaagaacctgcgcgagttcgtgttcaagaacatcgacggctacttcaagatctacagcaagcacacccctatcaacctcgtgcgggatctgcctcagggcttctctgctctggaacccctggtggatctgcccatcggcatcaacatcacccggtttcagacactgctggccctgcacagaagctacctgacacctggcgatagcagcagcggatggacagctggtgccgccgcttactatgtgggctacctgcagcctagaaccttcctgctgaagtacaacgagaacggcaccatcaccgacgccgtggattgtgcccttgatcctctgagcgagacaaagtgcaccctgaagtccttcaccgtggaaaagggcatctaccagaccagcaacttccgggtgcagcccaccgaatccatcgtgcggttccccaatatcaccaatctgtgccccttcggcgaggtgttcaatgccaccagattcgcctctgtgtacgcctggaaccggaagcggatcagcaattgcgtggccgactactccgtgctgtacaactccgccagcttcagcaccttcaagtgctacggcgtgtcccctaccaagctgaacgacctgtgcttcacaaacgtgtacgccgacagcttcgtgatccggggagatgaagtgcggcagattgcccctggacagacaggcaagatcgccgactacaactacaagctgcccgacgacttcaccggctgtgtgattgcctggaacagcaacaacctggactccaaagtcggcggcaactacaattacctgtaccggctgttccggaagtccaatctgaagcccttcgagcgggacatctccaccgagatctatcaggccggcagcaccccttgtaacggcgtggaaggcttcaactgctacttcccactgcagtcctacggctttcagcccacaaatggcgtgggctatcagccctacagagtggtggtgctgagcttcgaactgctgcatgcccctgccacagtgtgcggccctaagaaaagcaccaatctcgtgaagaacaaatgcgtgaacttcaacttcaacggcctgaccggcaccggcgtgctgacagagagcaacaagaagttcctgccattccagcagtttggccgggatatcgccgataccacagacgccgttagagatccccagacactggaaatcctggacatcaccccttgcagcttcggcggagtgtctgtgatcacccctggcaccaacaccagcaatcaggtggcagtgctgtaccaggacgtgaactgtaccgaagtgcccgtggccattcacgccgatcagctgacacctacatggcgggtgtactccaccggcagcaatgtgtttcagaccagagccggctgtctgatcggagccgagcacgtgaacaatagctacgagtgcgacatccccatcggcgctggcatctgtgccagctaccagacacagacaaacagccccagacgggccagatctgtggccagccagagcatcattgcctacacaatgtctctgggcgccgagaacagcgtggcctactccaacaactctatcgctatccccaccaacttcaccatcagcgtgaccacagagatcctgcctgtgtccatgaccaagaccagcgtggactgcaccatgtacatctgcggcgattccaccgagtgctccaacctgctgctgcagtacggcagcttctgcacccagctgaatagagccctgacagggatcgccgtggaacaggacaagaacacccaagaggtgttcgcccaagtgaagcagatctacaagacccctcctatcaaggacttcggcggcttcaatttcagccagattctgcccgatcctagcaagcccagcaagcggagcttcatcgaggacctgctgttcaacaaagtgacactggccgacgccggcttcatcaagcagtatggcgattgtctgggcgacattgccgccagggatctgatttgcgcccagaagtttaacggactgacagtgctgccaccactgctgaccgatgagatgatcgcccagtacacatctgccctgctggccggcacaatcacaagcggctggacatttggagctggcgccgctctgcagatcccctttgctatgcagatggcctaccggttcaacggcatcggagtgacccagaatgtgctgtacgagaaccagaagctgatcgccaaccagttcaacagcgccatcggcaagatccaggacagcctgagcagcacagcaagcgccctgggaaagctgcaggacgtggtcaaccagaatgcccaggcactgaacaccctggtcaagcagctgtcctccaacttcggcgccatcagctctgtgctgaacgatatcctgagcagactggacaaggtggaagccgaggtgcagatcgacagactgatcaccggaaggctgcagtccctgcagacctacgttacccagcagctgatcagagccgccgagattagagcctctgccaatctggccgccaccaagatgtctgagtgtgtgctgggccagagcaagagagtggacttttgcggcaagggctaccacctgatgagcttccctcagtctgcccctcacggcgtggtgtttctgcacgtgacatacgtgcccgctcaagagaagaatttcaccaccgctccagccatctgccacgacggcaaagcccactttcctagagaaggcgtgttcgtgtccaacggcacccattggttcgtgacccagcggaacttctacgagccccagatcatcaccaccgacaacaccttcgtgtctggcaactgcgacgtcgtgatcggcattgtgaacaataccgtgtacgaccctctgcagcccgagctggacagcttcaaagaggaactggataagtactttaagaaccacacaagccccgacgtggacctgggcgatatcagcggaatcaatgccagcgtcgtgaacatccagaaagagatcgaccggctgaacgaggtggccaagaatctgaacgagagcctgatcgacctgcaagaactggggaagtacgagcagtacatcaagggctatatccccgaggctcccagagatggccaggcctatgttcggaaggatggcgagtgggtcctgctgagcacctttctgctggaagtgctgtttcaaggccctggctctcaccaccaccatcaccactgatgaggatcc

SEQ ID NO: 110 - DNA, 3801 bp, Artificial Sequence
  Description of Artificial Sequence: Synthetic polynucleotide
atgtttctgctgaccaccaagcggaccatgttcgtgtttctggtgctgctgcctctggtgtccagccagtgtgtgaacctgaccacaagaacccagctgcctccagcctacaccaacagctttaccagaggcgtgtactaccccgacaaggtgttcagatccagcgtgctgcactctacccaggacctgttcctgcctttcttcagcaacgtgacctggttccacgccatccacgtgtccggcaccaatggcaccaagagattcgacaaccccgtgctgcccttcaacgacggggtgtactttgccagcaccgagaagtccaacatcatcagaggctggatcttcggcaccacactggacagcaagacccagagcctgctgatcgtgaacaacgccaccaacgtggtcatcaaagtgtgcgagttccagttctgcaacgaccccttcctgggcgtctactatcacaagaacaacaagagctggatggaaagcgagttccgggtgtacagcagcgccaacaactgcaccttcgagtacgtgtcccagcctttcctgatggacctggaaggcaagcagggcaacttcaagaacctgcgcgagttcgtgttcaagaacatcgacggctacttcaagatctacagcaagcacacccctatcaacctcgtgcgggatctgcctcagggcttctctgctctggaacccctggtggatctgcccatcggcatcaacatcacccggtttcagacactgctggccctgcacagaagctacctgacacctggcgatagcagcagcggatggacagctggtgccgccgcttactatgtgggctacctgcagcctagaaccttcctgctgaagtacaacgagaacggcaccatcaccgacgccgtggattgtgcccttgatcctctgagcgagacaaagtgcaccctgaagtccttcaccgtggaaaagggcatctaccagaccagcaacttccgggtgcagcccaccgaatccatcgtgcggttccccaatatcaccaatctgtgccccttcggcgaggtgttcaatgccaccagattcgcctctgtgtacgcctggaaccggaagcggatcagcaattgcgtggccgactactccgtgctgtacaactccgccagcttcagcaccttcaagtgctacggcgtgtcccctaccaagctgaacgacctgtgcttcacaaacgtgtacgccgacagcttcgtgatccggggagatgaagtgcggcagattgcccctggacagacaggcaagatcgccgactacaactacaagctgcccgacgacttcaccggctgtgtgattgcctggaacagcaacaacctggactccaaagtcggcggcaactacaattacctgtaccggctgttccggaagtccaatctgaagcccttcgagcgggacatctccaccgagatctatcaggccggcagcaccccttgtaacggcgtggaaggcttcaactgctacttcccactgcagtcctacggctttcagcccacaaatggcgtgggctatcagccctacagagtggtggtgctgagcttcgaactgctgcatgcccctgccacagtgtgcggccctaagaaaagcaccaatctcgtgaagaacaaatgcgtgaacttcaacttcaacggcctgaccggcaccggcgtgctgacagagagcaacaagaagttcctgccattccagcagtttggccgggatatcgccgataccacagacgccgttagagatccccagacactggaaatcctggacatcaccccttgcagcttcggcggagtgtctgtgatcacccctggcaccaacaccagcaatcaggtggcagtgctgtaccaggacgtgaactgtaccgaagtgcccgtggccattcacgccgatcagctgacacctacatggcgggtgtactccaccggcagcaatgtgtttcagaccagagccggctgtctgatcggagccgagcacgtgaacaatagctacgagtgcgacatccccatcggcgctggcatctgtgccagctaccagacacagacaaacagccccagacgggccagatctgtggccagccagagcatcattgcctacacaatgtctctgggcgccgagaacagcgtggcctactccaacaactctatcgctatccccaccaacttcaccatcagcgtgaccacagagatcctgcctgtgtccatgaccaagaccagcgtggactgcaccatgtacatctgcggcgattccaccgagtgctccaacctgctgctgcagtacggcagcttctgcacccagctgaatagagccctgacagggatcgccgtggaacaggacaagaacacccaagaggtgttcgcccaagtgaagcagatctacaagacccctcctatcaaggacttcggcggcttcaatttcagccagattctgcccgatcctagcaagcccagcaagcggagcttcatcgaggacctgctgttcaacaaagtgacactggccgacgccggcttcatcaagcagtatggcgattgtctgggcgacattgccgccagggatctgatttgcgcccagaagtttaacggactgacagtgctgccaccactgctgaccgatgagatgatcgcccagtacacatctgccctgctggccggcacaatcacaagcggctggacatttggagctggcgccgctctgcagatcccctttgctatgcagatggcctaccggttcaacggcatcggagtgacccagaatgtgctgtacgagaaccagaagctgatcgccaaccagttcaacagcgccatcggcaagatccaggacagcctgagcagcacagcaagcgccctgggaaagctgcaggacgtggtcaaccagaatgcccaggcactgaacaccctggtcaagcagctgtcctccaacttcggcgccatcagctctgtgctgaacgatatcctgagcagactggacaaggtggaagccgaggtgcagatcgacagactgatcaccggaaggctgcagtccctgcagacctacgttacccagcagctgatcagagccgccgagattagagcctctgccaatctggccgccaccaagatgtctgagtgtgtgctgggccagagcaagagagtggacttttgcggcaagggctaccacctgatgagcttccctcagtctgcccctcacggcgtggtgtttctgcacgtgacatacgtgcccgctcaagagaagaatttcaccaccgctccagccatctgccacgacggcaaagcccactttcctagagaaggcgtgttcgtgtccaacggcacccattggttcgtgacccagcggaacttctacgagccccagatcatcaccaccgacaacaccttcgtgtctggcaactgcgacgtcgtgatcggcattgtgaacaataccgtgtacgaccctctgcagcccgagctggacagcttcaaagaggaactggataagtactttaagaaccacacaagccccgacgtggacctgggcgatatcagcggaatcaatgccagcgtcgtgaacatccagaaagagatcgaccggctgaacgaggtggccaagaatctgaacgagagcctgatcgacctgcaagaactggggaagtacgagcagtacatcaagggctatatccccgaggctcccagagatggccaggcctatgttcggaaggatggcgagtgggtcctgctgagcacctttctgctggaagtgctgtttcaaggccctggctctcaccaccaccatcaccactgatgaggatcc

SEQ ID NO: 111 - DNA, 3781 bp, Artificial Sequence
  Description of Artificial Sequence: Synthetic polynucleotide
gcttctggtggtgtccaacctcctgctgcctcaaggtgttctggcccagtgtgtgaacctgaccacaagaacccagctgcctccagcctacaccaacagctttaccagaggcgtgtactaccccgacaaggtgttcagatccagcgtgctgcactctacccaggacctgttcctgcctttcttcagcaacgtgacctggttccacgccatccacgtgtccggcaccaatggcaccaagagattcgacaaccccgtgctgcccttcaacgacggggtgtactttgccagcaccgagaagtccaacatcatcagaggctggatcttcggcaccacactggacagcaagacccagagcctgctgatcgtgaacaacgccaccaacgtggtcatcaaagtgtgcgagttccagttctgcaacgaccccttcctgggcgtctactatcacaagaacaacaagagctggatggaaagcgagttccgggtgtacagcagcgccaacaactgcaccttcgagtacgtgtcccagcctttcctgatggacctggaaggcaagcagggcaacttcaagaacctgcgcgagttcgtgttcaagaacatcgacggctacttcaagatctacagcaagcacacccctatcaacctcgtgcgggatctgcctcagggcttctctgctctggaacccctggtggatctgcccatcggcatcaacatcacccggtttcagacactgctggccctgcacagaagctacctgacacctggcgatagcagcagcggatggacagctggtgccgccgcttactatgtgggctacctgcagcctagaaccttcctgctgaagtacaacgagaacggcaccatcaccgacgccgtggattgtgcccttgatcctctgagcgagacaaagtgcaccctgaagtccttcaccgtggaaaagggcatctaccagaccagcaacttccgggtgcagcccaccgaatccatcgtgcggttccccaatatcaccaatctgtgccccttcggcgaggtgttcaatgccaccagattcgcctctgtgtacgcctggaaccggaagcggatcagcaattgcgtggccgactactccgtgctgtacaactccgccagcttcagcaccttcaagtgctacggcgtgtcccctaccaagctgaacgacctgtgcttcacaaacgtgtacgccgacagcttcgtgatccggggagatgaagtgcggcagattgcccctggacagacaggcaagatcgccgactacaactacaagctgcccgacgacttcaccggctgtgtgattgcctggaacagcaacaacctggactccaaagtcggcggcaactacaattacctgtaccggctgttccggaagtccaatctgaagcccttcgagcgggacatctccaccgagatctatcaggccggcagcaccccttgtaacggcgtggaaggcttcaactgctacttcccactgcagtcctacggctttcagcccacaaatggcgtgggctatcagccctacagagtggtggtgctgagcttcgaactgctgcatgcccctgccacagtgtgcggccctaagaaaagcaccaatctcgtgaagaacaaatgcgtgaacttcaacttcaacggcctgaccggcaccggcgtgctgacagagagcaacaagaagttcctgccattccagcagtttggccgggatatcgccgataccacagacgccgttagagatccccagacactggaaatcctggacatcaccccttgcagcttcggcggagtgtctgtgatcacccctggcaccaacaccagcaatcaggtggcagtgctgtaccaggacgtgaactgtaccgaagtgcccgtggccattcacgccgatcagctgacacctacatggcgggtgtactccaccggcagcaatgtgtttcagaccagagccggctgtctgatcggagccgagcacgtgaacaatagctacgagtgcgacatccccatcggcgctggcatctgtgccagctaccagacacagacaaacagccccagacgggccagatctgtggcctctcaatctatcggcggaggctctggatctctgggcgccgaaaattccgtggcctactccaacaactctatcgctatccccaccaacttcaccatcagcgtgaccacagagatcctgcctgtgtccatgaccaagaccagcgtggactgcaccatgtacatctgcggcgattccaccgagtgctccaacctgctgctgcagtacggcagcttctgcacccagctgaatagagccctgacagggatcgccgtggaacaggacaagaacacccaagaggtgttcgcccaagtgaagcagatctacaagacccctcctatcaaggacttcggcggcttcaatttcagccagattctgcccgatcctagcggaggcggcagcggctcttttatcgaggacctgctgttcaacaaagtgacactggccgacgccggcttcatcaagcagtatggcgattgtctgggcgacattgccgccagggatctgatttgcgcccagaagtttaacggactgacagtgctgccaccactgctgaccgatgagatgatcgcccagtacacatctgccctgctggccggcacaatcacaagcggctggacatttggagctggcgccgctctgcagatcccctttgctatgcagatggcctaccggttcaacggcatcggagtgacccagaatgtgctgtacgagaaccagaagctgatcgccaaccagttcaacagcgccatcggcaagatccaggacagcctgagcagcacagcaagcgccctgggaaagctgcaggacgtggtcaaccagaatgcccaggcactgaacaccctggtcaagcagctgtcctccaacttcggcgccatcagctctgtgctgaacgatatcctgagcagactggacaaggtggaagccgaggtgcagatcgacagactgatcaccggaaggctgcagtccctgcagacctacgttacccagcagctgatcagagccgccgagattagagcctctgccaatctggccgccaccaagatgtctgagtgtgtgctgggccagagcaagagagtggacttttgcggcaagggctaccacctgatgagcttccctcagtctgcccctcacggcgtggtgtttctgcacgtgacatacgtgcccgctcaagagaagaatttcaccaccgctccagccatctgccacgacggcaaagcccactttcctagagaaggcgtgttcgtgtccaacggcacccattggttcgtgacccagcggaacttctacgagccccagatcatcaccaccgacaacaccttcgtgtctggcaactgcgacgtcgtgatcggcattgtgaacaataccgtgtacgaccctctgcagcccgagctggacagcttcaaagaggaactggataagtactttaagaaccacacaagccccgacgtggacctgggcgatatcagcggaatcaatgccagcgtcgtgaacatccagaaagagatcgaccggctgaacgaggtggccaagaatctgaacgagagcctgatcgacctgcaagaactggggaagtacgagcagtacatcaagggctatatccccgaggctcccagagatggccaggcctatgttcggaaggatggcgagtgggtcctgctgagcacctttctgctggaagtgctgtttcaaggccctggctctcaccaccaccatcaccactgatgaggatcc

SEQ ID NO: 112 - DNA, 3801 bp, Artificial Sequence
  Description of Artificial Sequence: Synthetic polynucleotide
atgtttctgctgaccaccaagcggaccatgttcgtgtttctggtgctgctgcctctggtgtccagccagtgtgtgaacctgaccacaagaacccagctgcctccagcctacaccaacagctttaccagaggcgtgtactaccccgacaaggtgttcagatccagcgtgctgcactctacccaggacctgttcctgcctttcttcagcaacgtgacctggttccacgccatccacgtgtccggcaccaatggcaccaagagattcgacaaccccgtgctgcccttcaacgacggggtgtactttgccagcaccgagaagtccaacatcatcagaggctggatcttcggcaccacactggacagcaagacccagagcctgctgatcgtgaacaacgccaccaacgtggtcatcaaagtgtgcgagttccagttctgcaacgaccccttcctgggcgtctactatcacaagaacaacaagagctggatggaaagcgagttccgggtgtacagcagcgccaacaactgcaccttcgagtacgtgtcccagcctttcctgatggacctggaaggcaagcagggcaacttcaagaacctgcgcgagttcgtgttcaagaacatcgacggctacttcaagatctacagcaagcacacccctatcaacctcgtgcgggatctgcctcagggcttctctgctctggaacccctggtggatctgcccatcggcatcaacatcacccggtttcagacactgctggccctgcacagaagctacctgacacctggcgatagcagcagcggatggacagctggtgccgccgcttactatgtgggctacctgcagcctagaaccttcctgctgaagtacaacgagaacggcaccatcaccgacgccgtggattgtgcccttgatcctctgagcgagacaaagtgcaccctgaagtccttcaccgtggaaaagggcatctaccagaccagcaacttccgggtgcagcccaccgaatccatcgtgcggttccccaatatcaccaatctgtgccccttcggcgaggtgttcaatgccaccagattcgcctctgtgtacgcctggaaccggaagcggatcagcaattgcgtggccgactactccgtgctgtacaactccgccagcttcagcaccttcaagtgctacggcgtgtcccctaccaagctgaacgacctgtgcttcacaaacgtgtacgccgacagcttcgtgatccggggagatgaagtgcggcagattgcccctggacagacaggcaagatcgccgactacaactacaagctgcccgacgacttcaccggctgtgtgattgcctggaacagcaacaacctggactccaaagtcggcggcaactacaattacctgtaccggctgttccggaagtccaatctgaagcccttcgagcgggacatctccaccgagatctatcaggccggcagcaccccttgtaacggcgtggaaggcttcaactgctacttcccactgcagtcctacggctttcagcccacaaatggcgtgggctatcagccctacagagtggtggtgctgagcttcgaactgctgcatgcccctgccacagtgtgcggccctaagaaaagcaccaatctcgtgaagaacaaatgcgtgaacttcaacttcaacggcctgaccggcaccggcgtgctgacagagagcaacaagaagttcctgccattccagcagtttggccgggatatcgccgataccacagacgccgttagagatccccagacactggaaatcctggacatcaccccttgcagcttcggcggagtgtctgtgatcacccctggcaccaacaccagcaatcaggtggcagtgctgtaccaggacgtgaactgtaccgaagtgcccgtggccattcacgccgatcagctgacacctacatggcgggtgtactccaccggcagcaatgtgtttcagaccagagccggctgtctgatcggagccgagcacgtgaacaatagctacgagtgcgacatccccatcggcgctggcatctgtgccagctaccagacacagacaaacagccccagacgggccagatctgtggcctctcaatctatcggcggaggctctggatctctgggcgccgaaaattccgtggcctactccaacaactctatcgctatccccaccaacttcaccatcagcgtgaccacagagatcctgcctgtgtccatgaccaagaccagcgtggactgcaccatgtacatctgcggcgattccaccgagtgctccaacctgctgctgcagtacggcagcttctgcacccagctgaatagagccctgacagggatcgccgtggaacaggacaagaacacccaagaggtgttcgcccaagtgaagcagatctacaagacccctcctatcaaggacttcggcggcttcaatttcagccagattctgcccgatcctagcggaggcggcagcggctcttttatcgaggacctgctgttcaacaaagtgacactggccgacgccggcttcatcaagcagtatggcgattgtctgggcgacattgccgccagggatctgatttgcgcccagaagtttaacggactgacagtgctgccaccactgctgaccgatgagatgatcgcccagtacacatctgccctgctggccggcacaatcacaagcggctggacatttggagctggcgccgctctgcagatcccctttgctatgcagatggcctaccggttcaacggcatcggagtgacccagaatgtgctgtacgagaaccagaagctgatcgccaaccagttcaacagcgccatcggcaagatccaggacagcctgagcagcacagcaagcgccctgggaaagctgcaggacgtggtcaaccagaatgcccaggcactgaacaccctggtcaagcagctgtcctccaacttcggcgccatcagctctgtgctgaacgatatcctgagcagactggacaaggtggaagccgaggtgcagatcgacagactgatcaccggaaggctgcagtccctgcagacctacgttacccagcagctgatcagagccgccgagattagagcctctgccaatctggccgccaccaagatgtctgagtgtgtgctgggccagagcaagagagtggacttttgcggcaagggctaccacctgatgagcttccctcagtctgcccctcacggcgtggtgtttctgcacgtgacatacgtgcccgctcaagagaagaatttcaccaccgctccagccatctgccacgacggcaaagcccactttcctagagaaggcgtgttcgtgtccaacggcacccattggttcgtgacccagcggaacttctacgagccccagatcatcaccaccgacaacaccttcgtgtctggcaactgcgacgtcgtgatcggcattgtgaacaataccgtgtacgaccctctgcagcccgagctggacagcttcaaagaggaactggataagtactttaagaaccacacaagccccgacgtggacctgggcgatatcagcggaatcaatgccagcgtcgtgaacatccagaaagagatcgaccggctgaacgaggtggccaagaatctgaacgagagcctgatcgacctgcaagaactggggaagtacgagcagtacatcaagggctatatccccgaggctcccagagatggccaggcctatgttcggaaggatggcgagtgggtcctgctgagcacctttctgctggaagtgctgtttcaaggccctggctctcaccaccaccatcaccactgatgaggatcc

SEQ ID NO: 113 - DNA, 3744 bp, Artificial Sequence
  Description of Artificial Sequence: Synthetic polynucleotide
atggattctaagggcagcagccagaagggctccagactgctgctgcttctggtggtgtccaacctcctgctgcctcaaggtgttctggcccagtgtgtgaacctgaccacaagaacccagctgcctccagcctacaccaacagctttaccagaggcgtgtactaccccgacaaggtgttcagatccagcgtgctgcactctacccaggacctgttcctgcctttcttcagcaacgtgacctggttccacgccatccacgtgtccggcaccaatggcaccaagagattcgacaaccccgtgctgcccttcaacgacggggtgtactttgccagcaccgagaagtccaacatcatcagaggctggatcttcggcaccacactggacagcaagacccagagcctgctgatcgtgaacaacgccaccaacgtggtcatcaaagtgtgcgagttccagttctgcaacgaccccttcctgggcgtctactatcacaagaacaacaagagctggatggaaagcgagttccgggtgtacagcagcgccaacaactgcaccttcgagtacgtgtcccagcctttcctgatggacctggaaggcaagcagggcaacttcaagaacctgcgcgagttcgtgttcaagaacatcgacggctacttcaagatctacagcaagcacacccctatcaacctcgtgcgggatctgcctcagggcttctctgctctggaacccctggtggatctgcccatcggcatcaacatcacccggtttcagacactgctggccctgcacagaagctacctgacacctggcgatagcagcagcggatggacagctggtgccgccgcttactatgtgggctacctgcagcctagaaccttcctgctgaagtacaacgagaacggcaccatcaccgacgccgtggattgtgcccttgatcctctgagcgagacaaagtgcaccctgaagtccttcaccgtggaaaagggcatctaccagaccagcaacttccgggtgcagcccaccgaatccatcgtgcggttccccaatatcaccaatctgtgccccttcggcgaggtgttcaatgccaccagattcgcctctgtgtacgcctggaaccggaagcggatcagcaattgcgtggccgactactccgtgctgtacaactccgccagcttcagcaccttcaagtgctacggcgtgtcccctaccaagctgaacgacctgtgcttcacaaacgtgtacgccgacagcttcgtgatccggggagatgaagtgcggcagattgcccctggacagacaggcaagatcgccgactacaactacaagctgcccgacgacttcaccggctgtgtgattgcctggaacagcaacaacctggactccaaagtcggcggcaactacaattacctgtaccggctgttccggaagtccaatctgaagcccttcgagcgggacatctccaccgagatctatcaggccggcagcaccccttgtaacggcgtggaaggcttcaactgctacttcccactgcagtcctacggctttcagcccacaaatggcgtgggctatcagccctacagagtggtggtgctgagcttcgaactgctgcatgcccctgccacagtgtgcggccctaagaaaagcaccaatctcgtgaagaacaaatgcgtgaacttcaacttcaacggcctgaccggcaccggcgtgctgacagagagcaacaagaagttcctgccattccagcagtttggccgggatatcgccgataccacagacgccgttagagatccccagacactggaaatcctggacatcaccccttgcagcttcggcggagtgtctgtgatcacccctggcaccaacaccagcaatcaggtggcagtgctgtaccaggacgtgaactgtaccgaagtgcccgtggccattcacgccgatcagctgacacctacatggcgggtgtactccaccggcagcaatgtgtttcagaccagagccggctgtctgatcggagccgagcacgtgaacaatagctacgagtgcgacatccccatcggcgctggcatctgtgccagctaccagacacagacaaacagccccagacgggccagatctgtggccagccagagcatcattgcctacacaatgtctctgggcgccgagaacagcgtggcctactccaacaactctatcgctatccccaccaacttcaccatcagcgtgaccacagagatcctgcctgtgtccatgaccaagaccagcgtggactgcaccatgtacatctgcggcgattccaccgagtgctccaacctgctgctgcagtacggcagcttctgcacccagctgaatagagccctgacagggatcgccgtggaacaggacaagaacacccaagaggtgttcgcccaagtgaagcagatctacaagacccctcctatcaaggacttcggcggcttcaatttcagccagattctgcccgatcctagcaagcccagcaagcggagcttcatcgaggacctgctgttcaacaaagtgacactggccgacgccggcttcatcaagcagtatggcgattgtctgggcgacattgccgccagggatctgatttgcgcccagaagtttaacggactgacagtgctgccaccactgctgaccgatgagatgatcgcccagtacacatctgccctgctggccggcacaatcacaagcggctggacatttggagctggcgccgctctgcagatcccctttgctatgcagatggcctaccggttcaacggcatcggagtgacccagaatgtgctgtacgagaaccagaagctgatcgccaaccagttcaacagcgccatcggcaagatccaggacagcctgagcagcacagcaagcgccctgggaaagctgcaggacgtggtcaaccagaatgcccaggcactgaacaccctggtcaagcagctgtcctccaacttcggcgccatcagctctgtgctgaacgatatcctgagcagactggacccgccggaagccgaggtgcagatcgacagactgatcaccggaaggctgcagtccctgcagacctacgttacccagcagctgatcagagccgccgagattagagcctctgccaatctggccgccaccaagatgtctgagtgtgtgctgggccagagcaagagagtggacttttgcggcaagggctaccacctgatgagcttccctcagtctgcccctcacggcgtggtgtttctgcacgtgacatacgtgcccgctcaagagaagaatttcaccaccgctccagccatctgccacgacggcaaagcccactttcctagagaaggcgtgttcgtgtccaacggcacccattggttcgtgacccagcggaacttctacgagccccagatcatcaccaccgacaacaccttcgtgtctggcaactgcgacgtcgtgatcggcattgtgaacaataccgtgtacgaccctctgcagcccgagctggacagcttcaaagaggaactggataagtactttaagaaccacacaagccccgacgtggacctgggcgatatcagcggaatcaatgccagcgtcgtgaacatccagaaagagatcgaccggctgaacgaggtggccaagaatctgaacgagagcctgatcgacctgcaagaactggggaagtacgagcagtacatcaagctggaagtgctgtttcaaggccctggctctcaccaccaccatcaccactgatgaggatcc

SEQ ID NO: 114 - DNA, 3720 bp, Artificial Sequence
  Description of Artificial Sequence: Synthetic polynucleotide
atgtttctgctgaccaccaagcggaccatgttcgtgtttctggtgctgctgcctctggtgtccagccagtgtgtgaacctgaccacaagaacccagctgcctccagcctacaccaacagctttaccagaggcgtgtactaccccgacaaggtgttcagatccagcgtgctgcactctacccaggacctgttcctgcctttcttcagcaacgtgacctggttccacgccatccacgtgtccggcaccaatggcaccaagagattcgacaaccccgtgctgcccttcaacgacggggtgtactttgccagcaccgagaagtccaacatcatcagaggctggatcttcggcaccacactggacagcaagacccagagcctgctgatcgtgaacaacgccaccaacgtggtcatcaaagtgtgcgagttccagttctgcaacgaccccttcctgggcgtctactatcacaagaacaacaagagctggatggaaagcgagttccgggtgtacagcagcgccaacaactgcaccttcgagtacgtgtcccagcctttcctgatggacctggaaggcaagcagggcaacttcaagaacctgcgcgagttcgtgttcaagaacatcgacggctacttcaagatctacagcaagcacacccctatcaacctcgtgcgggatctgcctcagggcttctctgctctggaacccctggtggatctgcccatcggcatcaacatcacccggtttcagacactgctggccctgcacagaagctacctgacacctggcgatagcagcagcggatggacagctggtgccgccgcttactatgtgggctacctgcagcctagaaccttcctgctgaagtacaacgagaacggcaccatcaccgacgccgtggattgtgcccttgatcctctgagcgagacaaagtgcaccctgaagtccttcaccgtggaaaagggcatctaccagaccagcaacttccgggtgcagcccaccgaatccatcgtgcggttccccaatatcaccaatctgtgccccttcggcgaggtgttcaatgccaccagattcgcctctgtgtacgcctggaaccggaagcggatcagcaattgcgtggccgactactccgtgctgtacaactccgccagcttcagcaccttcaagtgctacggcgtgtcccctaccaagctgaacgacctgtgcttcacaaacgtgtacgccgacagcttcgtgatccggggagatgaagtgcggcagattgcccctggacagacaggcaagatcgccgactacaactacaagctgcccgacgacttcaccggctgtgtgattgcctggaacagcaacaacctggactccaaagtcggcggcaactacaattacctgtaccggctgttccggaagtccaatctgaagcccttcgagcgggacatctccaccgagatctatcaggccggcagcaccccttgtaacggcgtggaaggcttcaactgctacttcccactgcagtcctacggctttcagcccacaaatggcgtgggctatcagccctacagagtggtggtgctgagcttcgaactgctgcatgcccctgccacagtgtgcggccctaagaaaagcaccaatctcgtgaagaacaaatgcgtgaacttcaacttcaacggcctgaccggcaccggcgtgctgacagagagcaacaagaagttcctgccattccagcagtttggccgggatatcgccgataccacagacgccgttagagatccccagacactggaaatcctggacatcaccccttgcagcttcggcggagtgtctgtgatcacccctggcaccaacaccagcaatcaggtggcagtgctgtaccaggacgtgaactgtaccgaagtgcccgtggccattcacgccgatcagctgacacctacatggcgggtgtactccaccggcagcaatgtgtttcagaccagagccggctgtctgatcggagccgagcacgtgaacaatagctacgagtgcgacatccccatcggcgctggcatctgtgccagctaccagacacagacaaacagccccagacgggccagatctgtggccagccagagcatcattgcctacacaatgtctctgggcgccgagaacagcgtggcctactccaacaactctatcgctatccccaccaacttcaccatcagcgtgaccacagagatcctgcctgtgtccatgaccaagaccagcgtggactgcaccatgtacatctgcggcgattccaccgagtgctccaacctgctgctgcagtacggcagcttctgcacccagctgaatagagccctgacagggatcgccgtggaacaggacaagaacacccaagaggtgttcgcccaagtgaagcagatctacaagacccctcctatcaaggacttcggcggcttcaatttcagccagattctgcccgatcctagcaagcccagcaagcggagcttcatcgaggacctgctgttcaacaaagtgacactggccgacgccggcttcatcaagcagtatggcgattgtctgggcgacattgccgccagggatctgatttgcgcccagaagtttaacggactgacagtgctgccaccactgctgaccgatgagatgatcgcccagtacacatctgccctgctggccggcacaatcacaagcggctggacatttggagctggcgccgctctgcagatcccctttgctatgcagatggcctaccggttcaacggcatcggagtgacccagaatgtgctgtacgagaaccagaagctgatcgccaaccagttcaacagcgccatcggcaagatccaggacagcctgagcagcacagcaagcgccctgggaaagctgcaggacgtggtcaaccagaatgcccaggcactgaacaccctggtcaagcagctgtcctccaacttcggcgccatcagctctgtgctgaacgatatcctgagcagactggacccgccggaagccgaggtgcagatcgacagactgatcaccggaaggctgcagtccctgcagacctacgttacccagcagctgatcagagccgccgagattagagcctctgccaatctggccgccaccaagatgtctgagtgtgtgctgggccagagcaagagagtggacttttgcggcaagggctaccacctgatgagcttccctcagtctgcccctcacggcgtggtgtttctgcacgtgacatacgtgcccgctcaagagaagaatttcaccaccgctccagccatctgccacgacggcaaagcccactttcctagagaaggcgtgttcgtgtccaacggcacccattggttcgtgacccagcggaacttctacgagccccagatcatcaccaccgacaacaccttcgtgtctggcaactgcgacgtcgtgatcggcattgtgaacaataccgtgtacgaccctctgcagcccgagctggacagcttcaaagaggaactggataagtactttaagaaccacacaagccccgacgtggacctgggcgatatcagcggaatcaatgccagcgtcgtgaacatccagaaagagatcgaccggctgaacgaggtggccaagaatctgaacgagagcctgatcgacctgcaagaactggggaagtacgagcagtacatcaagctggaagtgctgtttcaaggccctggctctcaccaccaccatcaccactgatgaggatcc

SEQ ID NO: 115 - DNA, 3744 bp, Artificial Sequence
  Description of Artificial Sequence: Synthetic polynucleotide
atggattctaagggcagcagccagaagggctccagactgctgctgcttctggtggtgtccaacctcctgctgcctcaaggtgttctggcccagtgtgtgaacctgaccacaagaacccagctgcctccagcctacaccaacagctttaccagaggcgtgtactaccccgacaaggtgttcagatccagcgtgctgcactctacccaggacctgttcctgcctttcttcagcaacgtgacctggttccacgccatccacgtgtccggcaccaatggcaccaagagattcgacaaccccgtgctgcccttcaacgacggggtgtactttgccagcaccgagaagtccaacatcatcagaggctggatcttcggcaccacactggacagcaagacccagagcctgctgatcgtgaacaacgccaccaacgtggtcatcaaagtgtgcgagttccagttctgcaacgaccccttcctgggcgtctactatcacaagaacaacaagagctggatggaaagcgagttccgggtgtacagcagcgccaacaactgcaccttcgagtacgtgtcccagcctttcctgatggacctggaaggcaagcagggcaacttcaagaacctgcgcgagttcgtgttcaagaacatcgacggctacttcaagatctacagcaagcacacccctatcaacctcgtgcgggatctgcctcagggcttctctgctctggaacccctggtggatctgcccatcggcatcaacatcacccggtttcagacactgctggccctgcacagaagctacctgacacctggcgatagcagcagcggatggacagctggtgccgccgcttactatgtgggctacctgcagcctagaaccttcctgctgaagtacaacgagaacggcaccatcaccgacgccgtggattgtgcccttgatcctctgagcgagacaaagtgcaccctgaagtccttcaccgtggaaaagggcatctaccagaccagcaacttccgggtgcagcccaccgaatccatcgtgcggttccccaatatcaccaatctgtgccccttcggcgaggtgttcaatgccaccagattcgcctctgtgtacgcctggaaccggaagcggatcagcaattgcgtggccgactactccgtgctgtacaactccgccagcttcagcaccttcaagtgctacggcgtgtcccctaccaagctgaacgacctgtgcttcacaaacgtgtacgccgacagcttcgtgatccggggagatgaagtgcggcagattgcccctggacagacaggcaagatcgccgactacaactacaagctgcccgacgacttcaccggctgtgtgattgcctggaacagcaacaacctggactccaaagtcggcggcaactacaattacctgtaccggctgttccggaagtccaatctgaagcccttcgagcgggacatctccaccgagatctatcaggccggcagcaccccttgtaacggcgtggaaggcttcaactgctacttcccactgcagtcctacggctttcagcccacaaatggcgtgggctatcagccctacagagtggtggtgctgagcttcgaactgctgcatgcccctgccacagtgtgcggccctaagaaaagcaccaatctcgtgaagaacaaatgcgtgaacttcaacttcaacggcctgaccggcaccggcgtgctgacagagagcaacaagaagttcctgccattccagcagtttggccgggatatcgccgataccacagacgccgttagagatccccagacactggaaatcctggacatcaccccttgcagcttcggcggagtgtctgtgatcacccctggcaccaacaccagcaatcaggtggcagtgctgtaccaggacgtgaactgtaccgaagtgcccgtggccattcacgccgatcagctgacacctacatggcgggtgtactccaccggcagcaatgtgtttcagaccagagccggctgtctgatcggagccgagcacgtgaacaatagctacgagtgcgacatccccatcggcgctggcatctgtgccagctaccagacacagacaaacagccccagacgggccagatctgtggcctctcaatctatcggcggaggctctggatctctgggcgccgaaaattccgtggcctactccaacaactctatcgctatccccaccaacttcaccatcagcgtgaccacagagatcctgcctgtgtccatgaccaagaccagcgtggactgcaccatgtacatctgcggcgattccaccgagtgctccaacctgctgctgcagtacggcagcttctgcacccagctgaatagagccctgacagggatcgccgtggaacaggacaagaacacccaagaggtgttcgcccaagtgaagcagatctacaagacccctcctatcaaggacttcggcggcttcaatttcagccagattctgcccgatcctagcggaggcggcagcggctcttttatcgaggacctgctgttcaacaaagtgacactggccgacgccggcttcatcaagcagtatggcgattgtctgggcgacattgccgccagggatctgatttgcgcccagaagtttaacggactgacagtgctgccaccactgctgaccgatgagatgatcgcccagtacacatctgccctgctggccggcacaatcacaagcggctggacatttggagctggcgccgctctgcagatcccctttgctatgcagatggcctaccggttcaacggcatcggagtgacccagaatgtgctgtacgagaaccagaagctgatcgccaaccagttcaacagcgccatcggcaagatccaggacagcctgagcagcacagcaagcgccctgggaaagctgcaggacgtggtcaaccagaatgcccaggcactgaacaccctggtcaagcagctgtcctccaacttcggcgccatcagctctgtgctgaacgatatcctgagcagactggacccgccggaagccgaggtgcagatcgacagactgatcaccggaaggctgcagtccctgcagacctacgttacccagcagctgatcagagccgccgagattagagcctctgccaatctggccgccaccaagatgtctgagtgtgtgctgggccagagcaagagagtggacttttgcggcaagggctaccacctgatgagcttccctcagtctgcccctcacggcgtggtgtttctgcacgtgacatacgtgcccgctcaagagaagaatttcaccaccgctccagccatctgccacgacggcaaagcccactttcctagagaaggcgtgttcgtgtccaacggcacccattggttcgtgacccagcggaacttctacgagccccagatcatcaccaccgacaacaccttcgtgtctggcaactgcgacgtcgtgatcggcattgtgaacaataccgtgtacgaccctctgcagcccgagctggacagcttcaaagaggaactggataagtactttaagaaccacacaagccccgacgtggacctgggcgatatcagcggaatcaatgccagcgtcgtgaacatccagaaagagatcgaccggctgaacgaggtggccaagaatctgaacgagagcctgatcgacctgcaagaactggggaagtacgagcagtacatcaagctggaagtgctgtttcaaggccctggctctcaccaccaccatcaccactgatgaggatcc

SEQ ID NO: 116 - DNA, 3720 bp, Artificial Sequence
  Description of Artificial Sequence: Synthetic polynucleotide
atgtttctgctgaccaccaagcggaccatgttcgtgtttctggtgctgctgcctctggtgtccagccagtgtgtgaacctgaccacaagaacccagctgcctccagcctacaccaacagctttaccagaggcgtgtactaccccgacaaggtgttcagatccagcgtgctgcactctacccaggacctgttcctgcctttcttcagcaacgtgacctggttccacgccatccacgtgtccggcaccaatggcaccaagagattcgacaaccccgtgctgcccttcaacgacggggtgtactttgccagcaccgagaagtccaacatcatcagaggctggatcttcggcaccacactggacagcaagacccagagcctgctgatcgtgaacaacgccaccaacgtggtcatcaaagtgtgcgagttccagttctgcaacgaccccttcctgggcgtctactatcacaagaacaacaagagctggatggaaagcgagttccgggtgtacagcagcgccaacaactgcaccttcgagtacgtgtcccagcctttcctgatggacctggaaggcaagcagggcaacttcaagaacctgcgcgagttcgtgttcaagaacatcgacggctacttcaagatctacagcaagcacacccctatcaacctcgtgcgggatctgcctcagggcttctctgctctggaacccctggtggatctgcccatcggcatcaacatcacccggtttcagacactgctggccctgcacagaagctacctgacacctggcgatagcagcagcggatggacagctggtgccgccgcttactatgtgggctacctgcagcctagaaccttcctgctgaagtacaacgagaacggcaccatcaccgacgccgtggattgtgcccttgatcctctgagcgagacaaagtgcaccctgaagtccttcaccgtggaaaagggcatctaccagaccagcaacttccgggtgcagcccaccgaatccatcgtgcggttccccaatatcaccaatctgtgccccttcggcgaggtgttcaatgccaccagattcgcctctgtgtacgcctggaaccggaagcggatcagcaattgcgtggccgactactccgtgctgtacaactccgccagcttcagcaccttcaagtgctacggcgtgtcccctaccaagctgaacgacctgtgcttcacaaacgtgtacgccgacagcttcgtgatccggggagatgaagtgcggcagattgcccctggacagacaggcaagatcgccgactacaactacaagctgcccgacgacttcaccggctgtgtgattgcctggaacagcaacaacctggactccaaagtcggcggcaactacaattacctgtaccggctgttccggaagtccaatctgaagcccttcgagcgggacatctccaccgagatctatcaggccggcagcaccccttgtaacggcgtggaaggcttcaactgctacttcccactgcagtcctacggctttcagcccacaaatggcgtgggctatcagccctacagagtggtggtgctgagcttcgaactgctgcatgcccctgccacagtgtgcggccctaagaaaagcaccaatctcgtgaagaacaaatgcgtgaacttcaacttcaacggcctgaccggcaccggcgtgctgacagagagcaacaagaagttcctgccattccagcagtttggccgggatatcgccgataccacagacgccgttagagatccccagacactggaaatcctggacatcaccccttgcagcttcggcggagtgtctgtgatcacccctggcaccaacaccagcaatcaggtggcagtgctgtaccaggacgtgaactgtaccgaagtgcccgtggccattcacgccgatcagctgacacctacatggcgggtgtactccaccggcagcaatgtgtttcagaccagagccggctgtctgatcggagccgagcacgtgaacaatagctacgagtgcgacatccccatcggcgctggcatctgtgccagctaccagacacagacaaacagccccagacgggccagatctgtggcctctcaatctatcggcggaggctctggatctctgggcgccgaaaattccgtggcctactccaacaactctatcgctatccccaccaacttcaccatcagcgtgaccacagagatcctgcctgtgtccatgaccaagaccagcgtggactgcaccatgtacatctgcggcgattccaccgagtgctccaacctgctgctgcagtacggcagcttctgcacccagctgaatagagccctgacagggatcgccgtggaacaggacaagaacacccaagaggtgttcgcccaagtgaagcagatctacaagacccctcctatcaaggacttcggcggcttcaatttcagccagattctgcccgatcctagcggaggcggcagcggctcttttatcgaggacctgctgttcaacaaagtgacactggccgacgccggcttcatcaagcagtatggcgattgtctgggcgacattgccgccagggatctgatttgcgcccagaagtttaacggactgacagtgctgccaccactgctgaccgatgagatgatcgcccagtacacatctgccctgctggccggcacaatcacaagcggctggacatttggagctggcgccgctctgcagatcccctttgctatgcagatggcctaccggttcaacggcatcggagtgacccagaatgtgctgtacgagaaccagaagctgatcgccaaccagttcaacagcgccatcggcaagatccaggacagcctgagcagcacagcaagcgccctgggaaagctgcaggacgtggtcaaccagaatgcccaggcactgaacaccctggtcaagcagctgtcctccaacttcggcgccatcagctctgtgctgaacgatatcctgagcagactggacccgccggaagccgaggtgcagatcgacagactgatcaccggaaggctgcagtccctgcagacctacgttacccagcagctgatcagagccgccgagattagagcctctgccaatctggccgccaccaagatgtctgagtgtgtgctgggccagagcaagagagtggacttttgcggcaagggctaccacctgatgagcttccctcagtctgcccctcacggcgtggtgtttctgcacgtgacatacgtgcccgctcaagagaagaatttcaccaccgctccagccatctgccacgacggcaaagcccactttcctagagaaggcgtgttcgtgtccaacggcacccattggttcgtgacccagcggaacttctacgagccccagatcatcaccaccgacaacaccttcgtgtctggcaactgcgacgtcgtgatcggcattgtgaacaataccgtgtacgaccctctgcagcccgagctggacagcttcaaagaggaactggataagtactttaagaaccacacaagccccgacgtggacctgggcgatatcagcggaatcaatgccagcgtcgtgaacatccagaaagagatcgaccggctgaacgaggtggccaagaatctgaacgagagcctgatcgacctgcaagaactggggaagtacgagcagtacatcaagctggaagtgctgtttcaaggccctggctctcaccaccaccatcaccactgatgaggatcc

SEQ ID NO: 117 - DNA, 3858 bp, Artificial Sequence
  Description of Artificial Sequence: Synthetic polynucleotide
atgtttctgctgaccaccaagcggaccatgttcgtgtttctggtgctgctgcctctggtgtccagccagtgtgtgaacctgaccacaagaacccagctgcctccagcctacaccaacagctttaccagaggcgtgtactaccccgacaaggtgttcagatccagcgtgctgcactctacccaggacctgttcctgcctttcttcagcaacgtgacctggttccacgccatccacgtgtccggcaccaatggcaccaagagattcgacaaccccgtgctgcccttcaacgacggggtgtactttgccagcaccgagaagtccaacatcatcagaggctggatcttcggcaccacactggacagcaagacccagagcctgctgatcgtgaacaacgccaccaacgtggtcatcaaagtgtgcgagttccagttctgcaacgaccccttcctgggcgtctactatcacaagaacaacaagagctggatggaaagcgagttccgggtgtacagcagcgccaacaactgcaccttcgagtacgtgtcccagcctttcctgatggacctggaaggcaagcagggcaacttcaagaacctgcgcgagttcgtgttcaagaacatcgacggctacttcaagatctacagcaagcacacccctatcaacctcgtgcgggatctgcctcagggcttctctgctctggaacccctggtggatctgcccatcggcatcaacatcacccggtttcagacactgctggccctgcacagaagctacctgacacctggcgatagcagcagcggatggacagctggtgccgccgcttactatgtgggctacctgcagcctagaaccttcctgctgaagtacaacgagaacggcaccatcaccgacgccgtggattgtgcccttgatcctctgagcgagacaaagtgcaccctgaagtccttcaccgtggaaaagggcatctaccagaccagcaacttccgggtgcagcccaccgaatccatcgtgcggttccccaatatcaccaatctgtgccccttcggcgaggtgttcaatgccaccagattcgcctctgtgtacgcctggaaccggaagcggatcagcaattgcgtggccgactactccgtgctgtacaactccgccagcttcagcaccttcaagtgctacggcgtgtcccctaccaagctgaacgacctgtgcttcacaaacgtgtacgccgacagcttcgtgatccggggagatgaagtgcggcagattgcccctggacagacaggcaagatcgccgactacaactacaagctgcccgacgacttcaccggctgtgtgattgcctggaacagcaacaacctggactccaaagtcggcggcaactacaattacctgtaccggctgttccggaagtccaatctgaagcccttcgagcgggacatctccaccgagatctatcaggccggcagcaccccttgtaacggcgtggaaggcttcaactgctacttcccactgcagtcctacggctttcagcccacaaatggcgtgggctatcagccctacagagtggtggtgctgagcttcgaactgctgcatgcccctgccacagtgtgcggccctaagaaaagcaccaatctcgtgaagaacaaatgcgtgaacttcaacttcaacggcctgaccggcaccggcgtgctgacagagagcaacaagaagttcctgccattccagcagtttggccgggatatcgccgataccacagacgccgttagagatccccagacactggaaatcctggacatcaccccttgcagcttcggcggagtgtctgtgatcacccctggcaccaacaccagcaatcaggtggcagtgctgtaccaggacgtgaactgtaccgaagtgcccgtggccattcacgccgatcagctgacacctacatggcgggtgtactccaccggcagcaatgtgtttcagaccagagccggctgtctgatcggagccgagcacgtgaacaatagctacgagtgcgacatccccatcggcgctggcatctgtgccagctaccagacacagacaaacagccccagacgggccagatctgtggccagccagagcatcattgcctacacaatgtctctgggcgccgagaacagcgtggcctactccaacaactctatcgctatccccaccaacttcaccatcagcgtgaccacagagatcctgcctgtgtccatgaccaagaccagcgtggactgcaccatgtacatctgcggcgattccaccgagtgctccaacctgctgctgcagtacggcagcttctgcacccagctgaatagagccctgacagggatcgccgtggaacaggacaagaacacccaagaggtgttcgcccaagtgaagcagatctacaagacccctcctatcaaggacttcggcggcttcaatttcagccagattctgcccgatcctagcaagcccagcaagcggagcttcatcgaggacctgctgttcaacaaagtgacactggccgacgccggcttcatcaagcagtatggcgattgtctgggcgacattgccgccagggatctgatttgcgcccagaagtttaacggactgacagtgctgccaccactgctgaccgatgagatgatcgcccagtacacatctgccctgctggccggcacaatcacaagcggctggacatttggagctggcgccgctctgcagatcccctttgctatgcagatggcctaccggttcaacggcatcggagtgacccagaatgtgctgtacgagaaccagaagctgatcgccaaccagttcaacagcgccatcggcaagatccaggacagcctgagcagcacagcaagcgccctgggaaagctgcaggacgtggtcaaccagaatgcccaggcactgaacaccctggtcaagcagctgtcctccaacttcggcgccatcagctctgtgctgaacgatatcctgagcagactggacccgccggaagccgaggtgcagatcgacagactgatcaccggaaggctgcagtccctgcagacctacgttacccagcagctgatcagagccgccgagattagagcctctgccaatctggccgccaccaagatgtctgagtgtgtgctgggccagagcaagagagtggacttttgcggcaagggctaccacctgatgagcttccctcagtctgcccctcacggcgtggtgtttctgcacgtgacatacgtgcccgctcaagagaagaatttcaccaccgctccagccatctgccacgacggcaaagcccactttcctagagaaggcgtgttcgtgtccaacggcacccattggttcgtgacccagcggaacttctacgagccccagatcatcaccaccgacaacaccttcgtgtctggcaactgcgacgtcgtgatcggcattgtgaacaataccgtgtacgaccctctgcagcccgagctggacagcttcaaagaggaactggataagtactttaagaaccacacaagccccgacgtggacctgggcgatatcagcggaatcaatgccagcgtcgtgaacatccagaaagagatcgaccggctgaacgaggtggccaagaatctgaacgagagcctgatcgacctgcaagaactggggaagtacgagcagtacatcaagtggccctggtacatctggctgggctttatcgccggactgattgccatcgtgatggtcacaatcatgctgtgttgcatgaccagctgctgtagctgcctgaagggctgttgtagctgtggcagctgctgcaagttcgacgaggacgattctgagcccgtgctgaagggcgtgaaactgcactacacatgatgaggatcc

SEQ ID NO: 118 - DNA, 3882 bp, Artificial Sequence
  Description of Artificial Sequence: Synthetic polynucleotide
atggattctaagggcagcagccagaagggctccagactgctgctgcttctggtggtgtccaacctcctgctgcctcaaggtgttctggcccagtgtgtgaacctgaccacaagaacccagctgcctccagcctacaccaacagctttaccagaggcgtgtactaccccgacaaggtgttcagatccagcgtgctgcactctacccaggacctgttcctgcctttcttcagcaacgtgacctggttccacgccatccacgtgtccggcaccaatggcaccaagagattcgacaaccccgtgctgcccttcaacgacggggtgtactttgccagcaccgagaagtccaacatcatcagaggctggatcttcggcaccacactggacagcaagacccagagcctgctgatcgtgaacaacgccaccaacgtggtcatcaaagtgtgcgagttccagttctgcaacgaccccttcctgggcgtctactatcacaagaacaacaagagctggatggaaagcgagttccgggtgtacagcagcgccaacaactgcaccttcgagtacgtgtcccagcctttcctgatggacctggaaggcaagcagggcaacttcaagaacctgcgcgagttcgtgttcaagaacatcgacggctacttcaagatctacagcaagcacacccctatcaacctcgtgcgggatctgcctcagggcttctctgctctggaacccctggtggatctgcccatcggcatcaacatcacccggtttcagacactgctggccctgcacagaagctacctgacacctggcgatagcagcagcggatggacagctggtgccgccgcttactatgtgggctacctgcagcctagaaccttcctgctgaagtacaacgagaacggcaccatcaccgacgccgtggattgtgcccttgatcctctgagcgagacaaagtgcaccctgaagtccttcaccgtggaaaagggcatctaccagaccagcaacttccgggtgcagcccaccgaatccatcgtgcggttccccaatatcaccaatctgtgccccttcggcgaggtgttcaatgccaccagattcgcctctgtgtacgcctggaaccggaagcggatcagcaattgcgtggccgactactccgtgctgtacaactccgccagcttcagcaccttcaagtgctacggcgtgtcccctaccaagctgaacgacctgtgcttcacaaacgtgtacgccgacagcttcgtgatccggggagatgaagtgcggcagattgcccctggacagacaggcaagatcgccgactacaactacaagctgcccgacgacttcaccggctgtgtgattgcctggaacagcaacaacctggactccaaagtcggcggcaactacaattacctgtaccggctgttccggaagtccaatctgaagcccttcgagcgggacatctccaccgagatctatcaggccggcagcaccccttgtaacggcgtggaaggcttcaactgctacttcccactgcagtcctacggctttcagcccacaaatggcgtgggctatcagccctacagagtggtggtgctgagcttcgaactgctgcatgcccctgccacagtgtgcggccctaagaaaagcaccaatctcgtgaagaacaaatgcgtgaacttcaacttcaacggcctgaccggcaccggcgtgctgacagagagcaacaagaagttcctgccattccagcagtttggccgggatatcgccgataccacagacgccgttagagatccccagacactggaaatcctggacatcaccccttgcagcttcggcggagtgtctgtgatcacccctggcaccaacaccagcaatcaggtggcagtgctgtaccaggacgtgaactgtaccgaagtgcccgtggccattcacgccgatcagctgacacctacatggcgggtgtactccaccggcagcaatgtgtttcagaccagagccggctgtctgatcggagccgagcacgtgaacaatagctacgagtgcgacatccccatcggcgctggcatctgtgccagctaccagacacagacaaacagccccagacgggccagatctgtggccagccagagcatcattgcctacacaatgtctctgggcgccgagaacagcgtggcctactccaacaactctatcgctatccccaccaacttcaccatcagcgtgaccacagagatcctgcctgtgtccatgaccaagaccagcgtggactgcaccatgtacatctgcggcgattccaccgagtgctccaacctgctgctgcagtacggcagcttctgcacccagctgaatagagccctgacagggatcgccgtggaacaggacaagaacacccaagaggtgttcgcccaagtgaagcagatctacaagacccctcctatcaaggacttcggcggcttcaatttcagccagattctgcccgatcctagcaagcccagcaagcggagcttcatcgaggacctgctgttcaacaaagtgacactggccgacgccggcttcatcaagcagtatggcgattgtctgggcgacattgccgccagggatctgatttgcgcccagaagtttaacggactgacagtgctgccaccactgctgaccgatgagatgatcgcccagtacacatctgccctgctggccggcacaatcacaagcggctggacatttggagctggcgccgctctgcagatcccctttgctatgcagatggcctaccggttcaacggcatcggagtgacccagaatgtgctgtacgagaaccagaagctgatcgccaaccagttcaacagcgccatcggcaagatccaggacagcctgagcagcacagcaagcgccctgggaaagctgcaggacgtggtcaaccagaatgcccaggcactgaacaccctggtcaagcagctgtcctccaacttcggcgccatcagctctgtgctgaacgatatcctgagcagactggacccgccggaagccgaggtgcagatcgacagactgatcaccggaaggctgcagtccctgcagacctacgttacccagcagctgatcagagccgccgagattagagcctctgccaatctggccgccaccaagatgtctgagtgtgtgctgggccagagcaagagagtggacttttgcggcaagggctaccacctgatgagcttccctcagtctgcccctcacggcgtggtgtttctgcacgtgacatacgtgcccgctcaagagaagaatttcaccaccgctccagccatctgccacgacggcaaagcccactttcctagagaaggcgtgttcgtgtccaacggcacccattggttcgtgacccagcggaacttctacgagccccagatcatcaccaccgacaacaccttcgtgtctggcaactgcgacgtcgtgatcggcattgtgaacaataccgtgtacgaccctctgcagcccgagctggacagcttcaaagaggaactggataagtactttaagaaccacacaagccccgacgtggacctgggcgatatcagcggaatcaatgccagcgtcgtgaacatccagaaagagatcgaccggctgaacgaggtggccaagaatctgaacgagagcctgatcgacctgcaagaactggggaagtacgagcagtacatcaagtggccctggtacatctggctgggctttatcgccggactgattgccatcgtgatggtcacaatcatgctgtgttgcatgaccagctgctgtagctgcctgaagggctgttgtagctgtggcagctgctgcaagttcgacgaggacgattctgagcccgtgctgaagggcgtgaaactgcactacacatgatgaggatcc

SEQ ID NO: 119 - DNA, 3858 bp, Artificial Sequence
  Description of Artificial Sequence: Synthetic polynucleotide
atgtttctgctgaccaccaagcggaccatgttcgtgtttctggtgctgctgcctctggtgtccagccagtgtgtgaacctgaccacaagaacccagctgcctccagcctacaccaacagctttaccagaggcgtgtactaccccgacaaggtgttcagatccagcgtgctgcactctacccaggacctgttcctgcctttcttcagcaacgtgacctggttccacgccatccacgtgtccggcaccaatggcaccaagagattcgacaaccccgtgctgcccttcaacgacggggtgtactttgccagcaccgagaagtccaacatcatcagaggctggatcttcggcaccacactggacagcaagacccagagcctgctgatcgtgaacaacgccaccaacgtggtcatcaaagtgtgcgagttccagttctgcaacgaccccttcctgggcgtctactatcacaagaacaacaagagctggatggaaagcgagttccgggtgtacagcagcgccaacaactgcaccttcgagtacgtgtcccagcctttcctgatggacctggaaggcaagcagggcaacttcaagaacctgcgcgagttcgtgttcaagaacatcgacggctacttcaagatctacagcaagcacacccctatcaacctcgtgcgggatctgcctcagggcttctctgctctggaacccctggtggatctgcccatcggcatcaacatcacccggtttcagacactgctggccctgcacagaagctacctgacacctggcgatagcagcagcggatggacagctggtgccgccgcttactatgtgggctacctgcagcctagaaccttcctgctgaagtacaacgagaacggcaccatcaccgacgccgtggattgtgcccttgatcctctgagcgagacaaagtgcaccctgaagtccttcaccgtggaaaagggcatctaccagaccagcaacttccgggtgcagcccaccgaatccatcgtgcggttccccaatatcaccaatctgtgccccttcggcgaggtgttcaatgccaccagattcgcctctgtgtacgcctggaaccggaagcggatcagcaattgcgtggccgactactccgtgctgtacaactccgccagcttcagcaccttcaagtgctacggcgtgtcccctaccaagctgaacgacctgtgcttcacaaacgtgtacgccgacagcttcgtgatccggggagatgaagtgcggcagattgcccctggacagacaggcaagatcgccgactacaactacaagctgcccgacgacttcaccggctgtgtgattgcctggaacagcaacaacctggactccaaagtcggcggcaactacaattacctgtaccggctgttccggaagtccaatctgaagcccttcgagcgggacatctccaccgagatctatcaggccggcagcaccccttgtaacggcgtggaaggcttcaactgctacttcccactgcagtcctacggctttcagcccacaaatggcgtgggctatcagccctacagagtggtggtgctgagcttcgaactgctgcatgcccctgccacagtgtgcggccctaagaaaagcaccaatctcgtgaagaacaaatgcgtgaacttcaacttcaacggcctgaccggcaccggcgtgctgacagagagcaacaagaagttcctgccattccagcagtttggccgggatatcgccgataccacagacgccgttagagatccccagacactggaaatcctggacatcaccccttgcagcttcggcggagtgtctgtgatcacccctggcaccaacaccagcaatcaggtggcagtgctgtaccaggacgtgaactgtaccgaagtgcccgtggccattcacgccgatcagctgacacctacatggcgggtgtactccaccggcagcaatgtgtttcagaccagagccggctgtctgatcggagccgagcacgtgaacaatagctacgagtgcgacatccccatcggcgctggcatctgtgccagctaccagacacagacaaacagccccagacgggccagatctgtggcctctcaatctatcggcggaggctctggatctctgggcgccgaaaattccgtggcctactccaacaactctatcgctatccccaccaacttcaccatcagcgtgaccacagagatcctgcctgtgtccatgaccaagaccagcgtggactgcaccatgtacatctgcggcgattccaccgagtgctccaacctgctgctgcagtacggcagcttctgcacccagctgaatagagccctgacagggatcgccgtggaacaggacaagaacacccaagaggtgttcgcccaagtgaagcagatctacaagacccctcctatcaaggacttcggcggcttcaatttcagccagattctgcccgatcctagcggaggcggcagcggctcttttatcgaggacctgctgttcaacaaagtgacactggccgacgccggcttcatcaagcagtatggcgattgtctgggcgacattgccgccagggatctgatttgcgcccagaagtttaacggactgacagtgctgccaccactgctgaccgatgagatgatcgcccagtacacatctgccctgctggccggcacaatcacaagcggctggacatttggagctggcgccgctctgcagatcccctttgctatgcagatggcctaccggttcaacggcatcggagtgacccagaatgtgctgtacgagaaccagaagctgatcgccaaccagttcaacagcgccatcggcaagatccaggacagcctgagcagcacagcaagcgccctgggaaagctgcaggacgtggtcaaccagaatgcccaggcactgaacaccctggtcaagcagctgtcctccaacttcggcgccatcagctctgtgctgaacgatatcctgagcagactggacccgccggaagccgaggtgcagatcgacagactgatcaccggaaggctgcagtccctgcagacctacgttacccagcagctgatcagagccgccgagattagagcctctgccaatctggccgccaccaagatgtctgagtgtgtgctgggccagagcaagagagtggacttttgcggcaagggctaccacctgatgagcttccctcagtctgcccctcacggcgtggtgtttctgcacgtgacatacgtgcccgctcaagagaagaatttcaccaccgctccagccatctgccacgacggcaaagcccactttcctagagaaggcgtgttcgtgtccaacggcacccattggttcgtgacccagcggaacttctacgagccccagatcatcaccaccgacaacaccttcgtgtctggcaactgcgacgtcgtgatcggcattgtgaacaataccgtgtacgaccctctgcagcccgagctggacagcttcaaagaggaactggataagtactttaagaaccacacaagccccgacgtggacctgggcgatatcagcggaatcaatgccagcgtcgtgaacatccagaaagagatcgaccggctgaacgaggtggccaagaatctgaacgagagcctgatcgacctgcaagaactggggaagtacgagcagtacatcaagtggccctggtacatctggctgggctttatcgccggactgattgccatcgtgatggtcacaatcatgctgtgttgcatgaccagctgctgtagctgcctgaagggctgttgtagctgtggcagctgctgcaagttcgacgaggacgattctgagcccgtgctgaagggcgtgaaactgcactacacatgatgaggatcc

SEQ ID NO: 120 - DNA, 3882 bp, Artificial Sequence
  Description of Artificial Sequence: Synthetic polynucleotide
atggattctaagggcagcagccagaagggctccagactgctgctgcttctggtggtgtccaacctcctgctgcctcaaggtgttctggcccagtgtgtgaacctgaccacaagaacccagctgcctccagcctacaccaacagctttaccagaggcgtgtactaccccgacaaggtgttcagatccagcgtgctgcactctacccaggacctgttcctgcctttcttcagcaacgtgacctggttccacgccatccacgtgtccggcaccaatggcaccaagagattcgacaaccccgtgctgcccttcaacgacggggtgtactttgccagcaccgagaagtccaacatcatcagaggctggatcttcggcaccacactggacagcaagacccagagcctgctgatcgtgaacaacgccaccaacgtggtcatcaaagtgtgcgagttccagttctgcaacgaccccttcctgggcgtctactatcacaagaacaacaagagctggatggaaagcgagttccgggtgtacagcagcgccaacaactgcaccttcgagtacgtgtcccagcctttcctgatggacctggaaggcaagcagggcaacttcaagaacctgcgcgagttcgtgttcaagaacatcgacggctacttcaagatctacagcaagcacacccctatcaacctcgtgcgggatctgcctcagggcttctctgctctggaacccctggtggatctgcccatcggcatcaacatcacccggtttcagacactgctggccctgcacagaagctacctgacacctggcgatagcagcagcggatggacagctggtgccgccgcttactatgtgggctacctgcagcctagaaccttcctgctgaagtacaacgagaacggcaccatcaccgacgccgtggattgtgcccttgatcctctgagcgagacaaagtgcaccctgaagtccttcaccgtggaaaagggcatctaccagaccagcaacttccgggtgcagcccaccgaatccatcgtgcggttccccaatatcaccaatctgtgccccttcggcgaggtgttcaatgccaccagattcgcctctgtgtacgcctggaaccggaagcggatcagcaattgcgtggccgactactccgtgctgtacaactccgccagcttcagcaccttcaagtgctacggcgtgtcccctaccaagctgaacgacctgtgcttcacaaacgtgtacgccgacagcttcgtgatccggggagatgaagtgcggcagattgcccctggacagacaggcaagatcgccgactacaactacaagctgcccgacgacttcaccggctgtgtgattgcctggaacagcaacaacctggactccaaagtcggcggcaactacaattacctgtaccggctgttccggaagtccaatctgaagcccttcgagcgggacatctccaccgagatctatcaggccggcagcaccccttgtaacggcgtggaaggcttcaactgctacttcccactgcagtcctacggctttcagcccacaaatggcgtgggctatcagccctacagagtggtggtgctgagcttcgaactgctgcatgcccctgccacagtgtgcggccctaagaaaagcaccaatctcgtgaagaacaaatgcgtgaacttcaacttcaacggcctgaccggcaccggcgtgctgacagagagcaacaagaagttcctgccattccagcagtttggccgggatatcgccgataccacagacgccgttagagatccccagacactggaaatcctggacatcaccccttgcagcttcggcggagtgtctgtgatcacccctggcaccaacaccagcaatcaggtggcagtgctgtaccaggacgtgaactgtaccgaagtgcccgtggccattcacgccgatcagctgacacctacatggcgggtgtactccaccggcagcaatgtgtttcagaccagagccggctgtctgatcggagccgagcacgtgaacaatagctacgagtgcgacatccccatcggcgctggcatctgtgccagctaccagacacagacaaacagccccagacgggccagatctgtggcctctcaatctatcggcggaggctctggatctctgggcgccgaaaattccgtggcctactccaacaactctatcgctatccccaccaacttcaccatcagcgtgaccacagagatcctgcctgtgtccatgaccaagaccagcgtggactgcaccatgtacatctgcggcgattccaccgagtgctccaacctgctgctgcagtacggcagcttctgcacccagctgaatagagccctgacagggatcgccgtggaacaggacaagaacacccaagaggtgttcgcccaagtgaagcagatctacaagacccctcctatcaaggacttcggcggcttcaatttcagccagattctgcccgatcctagcggaggcggcagcggctcttttatcgaggacctgctgttcaacaaagtgacactggccgacgccggcttcatcaagcagtatggcgattgtctgggcgacattgccgccagggatctgatttgcgcccagaagtttaacggactgacagtgctgccaccactgctgaccgatgagatgatcgcccagtacacatctgccctgctggccggcacaatcacaagcggctggacatttggagctggcgccgctctgcagatcccctttgctatgcagatggcctaccggttcaacggcatcggagtgacccagaatgtgctgtacgagaaccagaagctgatcgccaaccagttcaacagcgccatcggcaagatccaggacagcctgagcagcacagcaagcgccctgggaaagctgcaggacgtggtcaaccagaatgcccaggcactgaacaccctggtcaagcagctgtcctccaacttcggcgccatcagctctgtgctgaacgatatcctgagcagactggacccgccggaagccgaggtgcagatcgacagactgatcaccggaaggctgcagtccctgcagacctacgttacccagcagctgatcagagccgccgagattagagcctctgccaatctggccgccaccaagatgtctgagtgtgtgctgggccagagcaagagagtggacttttgcggcaagggctaccacctgatgagcttccctcagtctgcccctcacggcgtggtgtttctgcacgtgacatacgtgcccgctcaagagaagaatttcaccaccgctccagccatctgccacgacggcaaagcccactttcctagagaaggcgtgttcgtgtccaacggcacccattggttcgtgacccagcggaacttctacgagccccagatcatcaccaccgacaacaccttcgtgtctggcaactgcgacgtcgtgatcggcattgtgaacaataccgtgtacgaccctctgcagcccgagctggacagcttcaaagaggaactggataagtactttaagaaccacacaagccccgacgtggacctgggcgatatcagcggaatcaatgccagcgtcgtgaacatccagaaagagatcgaccggctgaacgaggtggccaagaatctgaacgagagcctgatcgacctgcaagaactggggaagtacgagcagtacatcaagtggccctggtacatctggctgggctttatcgccggactgattgccatcgtgatggtcacaatcatgctgtgttgcatgaccagctgctgtagctgcctgaagggctgttgtagctgtggcagctgctgcaagttcgacgaggacgattctgagcccgtgctgaagggcgtgaaactgcactacacatgatgaggatcc

SEQ ID NO: 121 - DNA, 3825 bp, Artificial Sequence
  Description of Artificial Sequence: Synthetic polynucleotide
atggattctaagggcagcagccagaagggctccagactgctgctgcttctggtggtgtccaacctcctgctgcctcaaggtgttctggcccagtgtgtgaacctgaccacaagaacccagctgcctccagcctacaccaacagctttaccagaggcgtgtactaccccgacaaggtgttcagatccagcgtgctgcactctacccaggacctgttcctgcctttcttcagcaacgtgacctggttccacgccatccacgtgtccggcaccaatggcaccaagagattcgacaaccccgtgctgcccttcaacgacggggtgtactttgccagcaccgagaagtccaacatcatcagaggctggatcttcggcaccacactggacagcaagacccagagcctgctgatcgtgaacaacgccaccaacgtggtcatcaaagtgtgcgagttccagttctgcaacgaccccttcctgggcgtctactatcacaagaacaacaagagctggatggaaagcgagttccgggtgtacagcagcgccaacaactgcaccttcgagtacgtgtcccagcctttcctgatggacctggaaggcaagcagggcaacttcaagaacctgcgcgagttcgtgttcaagaacatcgacggctacttcaagatctacagcaagcacacccctatcaacctcgtgcgggatctgcctcagggcttctctgctctggaacccctggtggatctgcccatcggcatcaacatcacccggtttcagacactgctggccctgcacagaagctacctgacacctggcgatagcagcagcggatggacagctggtgccgccgcttactatgtgggctacctgcagcctagaaccttcctgctgaagtacaacgagaacggcaccatcaccgacgccgtggattgtgcccttgatcctctgagcgagacaaagtgcaccctgaagtccttcaccgtggaaaagggcatctaccagaccagcaacttccgggtgcagcccaccgaatccatcgtgcggttccccaatatcaccaatctgtgccccttcggcgaggtgttcaatgccaccagattcgcctctgtgtacgcctggaaccggaagcggatcagcaattgcgtggccgactactccgtgctgtacaactccgccagcttcagcaccttcaagtgctacggcgtgtcccctaccaagctgaacgacctgtgcttcacaaacgtgtacgccgacagcttcgtgatccggggagatgaagtgcggcagattgcccctggacagacaggcaagatcgccgactacaactacaagctgcccgacgacttcaccggctgtgtgattgcctggaacagcaacaacctggactccaaagtcggcggcaactacaattacctgtaccggctgttccggaagtccaatctgaagcccttcgagcgggacatctccaccgagatctatcaggccggcagcaccccttgtaacggcgtggaaggcttcaactgctacttcccactgcagtcctacggctttcagcccacaaatggcgtgggctatcagccctacagagtggtggtgctgagcttcgaactgctgcatgcccctgccacagtgtgcggccctaagaaaagcaccaatctcgtgaagaacaaatgcgtgaacttcaacttcaacggcctgaccggcaccggcgtgctgacagagagcaacaagaagttcctgccattccagcagtttggccgggatatcgccgataccacagacgccgttagagatccccagacactggaaatcctggacatcaccccttgcagcttcggcggagtgtctgtgatcacccctggcaccaacaccagcaatcaggtggcagtgctgtaccaggacgtgaactgtaccgaagtgcccgtggccattcacgccgatcagctgacacctacatggcgggtgtactccaccggcagcaatgtgtttcagaccagagccggctgtctgatcggagccgagcacgtgaacaatagctacgagtgcgacatccccatcggcgctggcatctgtgccagctaccagacacagacaaacagccccagacgggccagatctgtggccagccagagcatcattgcctacacaatgtctctgggcgccgagaacagcgtggcctactccaacaactctatcgctatccccaccaacttcaccatcagcgtgaccacagagatcctgcctgtgtccatgaccaagaccagcgtggactgcaccatgtacatctgcggcgattccaccgagtgctccaacctgctgctgcagtacggcagcttctgcacccagctgaatagagccctgacagggatcgccgtggaacaggacaagaacacccaagaggtgttcgcccaagtgaagcagatctacaagacccctcctatcaaggacttcggcggcttcaatttcagccagattctgcccgatcctagcaagcccagcaagcggagcttcatcgaggacctgctgttcaacaaagtgacactggccgacgccggcttcatcaagcagtatggcgattgtctgggcgacattgccgccagggatctgatttgcgcccagaagtttaacggactgacagtgctgccaccactgctgaccgatgagatgatcgcccagtacacatctgccctgctggccggcacaatcacaagcggctggacatttggagctggcgccgctctgcagatcccctttgctatgcagatggcctaccggttcaacggcatcggagtgacccagaatgtgctgtacgagaaccagaagctgatcgccaaccagttcaacagcgccatcggcaagatccaggacagcctgagcagcacagcaagcgccctgggaaagctgcaggacgtggtcaaccagaatgcccaggcactgaacaccctggtcaagcagctgtcctccaacttcggcgccatcagctctgtgctgaacgatatcctgagcagactggacccgccggaagccgaggtgcagatcgacagactgatcaccggaaggctgcagtccctgcagacctacgttacccagcagctgatcagagccgccgagattagagcctctgccaatctggccgccaccaagatgtctgagtgtgtgctgggccagagcaagagagtggacttttgcggcaagggctaccacctgatgagcttccctcagtctgcccctcacggcgtggtgtttctgcacgtgacatacgtgcccgctcaagagaagaatttcaccaccgctccagccatctgccacgacggcaaagcccactttcctagagaaggcgtgttcgtgtccaacggcacccattggttcgtgacccagcggaacttctacgagccccagatcatcaccaccgacaacaccttcgtgtctggcaactgcgacgtcgtgatcggcattgtgaacaataccgtgtacgaccctctgcagcccgagctggacagcttcaaagaggaactggataagtactttaagaaccacacaagccccgacgtggacctgggcgatatcagcggaatcaatgccagcgtcgtgaacatccagaaagagatcgaccggctgaacgaggtggccaagaatctgaacgagagcctgatcgacctgcaagaactggggaagtacgagcagtacatcaagggctatatccccgaggctcccagagatggccaggcctatgttcggaaggatggcgagtgggtcctgctgagcacctttctgctggaagtgctgtttcaaggccctggctctcaccaccaccatcaccactgatgaggatcc

SEQ ID NO: 122 - DNA, 3801 bp, Artificial Sequence
  Description of Artificial Sequence: Synthetic polynucleotide
atgtttctgctgaccaccaagcggaccatgttcgtgtttctggtgctgctgcctctggtgtccagccagtgtgtgaacctgaccacaagaacccagctgcctccagcctacaccaacagctttaccagaggcgtgtactaccccgacaaggtgttcagatccagcgtgctgcactctacccaggacctgttcctgcctttcttcagcaacgtgacctggttccacgccatccacgtgtccggcaccaatggcaccaagagattcgacaaccccgtgctgcccttcaacgacggggtgtactttgccagcaccgagaagtccaacatcatcagaggctggatcttcggcaccacactggacagcaagacccagagcctgctgatcgtgaacaacgccaccaacgtggtcatcaaagtgtgcgagttccagttctgcaacgaccccttcctgggcgtctactatcacaagaacaacaagagctggatggaaagcgagttccgggtgtacagcagcgccaacaactgcaccttcgagtacgtgtcccagcctttcctgatggacctggaaggcaagcagggcaacttcaagaacctgcgcgagttcgtgttcaagaacatcgacggctacttcaagatctacagcaagcacacccctatcaacctcgtgcgggatctgcctcagggcttctctgctctggaacccctggtggatctgcccatcggcatcaacatcacccggtttcagacactgctggccctgcacagaagctacctgacacctggcgatagcagcagcggatggacagctggtgccgccgcttactatgtgggctacctgcagcctagaaccttcctgctgaagtacaacgagaacggcaccatcaccgacgccgtggattgtgcccttgatcctctgagcgagacaaagtgcaccctgaagtccttcaccgtggaaaagggcatctaccagaccagcaacttccgggtgcagcccaccgaatccatcgtgcggttccccaatatcaccaatctgtgccccttcggcgaggtgttcaatgccaccagattcgcctctgtgtacgcctggaaccggaagcggatcagcaattgcgtggccgactactccgtgctgtacaactccgccagcttcagcaccttcaagtgctacggcgtgtcccctaccaagctgaacgacctgtgcttcacaaacgtgtacgccgacagcttcgtgatccggggagatgaagtgcggcagattgcccctggacagacaggcaagatcgccgactacaactacaagctgcccgacgacttcaccggctgtgtgattgcctggaacagcaacaacctggactccaaagtcggcggcaactacaattacctgtaccggctgttccggaagtccaatctgaagcccttcgagcgggacatctccaccgagatctatcaggccggcagcaccccttgtaacggcgtggaaggcttcaactgctacttcccactgcagtcctacggctttcagcccacaaatggcgtgggctatcagccctacagagtggtggtgctgagcttcgaactgctgcatgcccctgccacagtgtgcggccctaagaaaagcaccaatctcgtgaagaacaaatgcgtgaacttcaacttcaacggcctgaccggcaccggcgtgctgacagagagcaacaagaagttcctgccattccagcagtttggccgggatatcgccgataccacagacgccgttagagatccccagacactggaaatcctggacatcaccccttgcagcttcggcggagtgtctgtgatcacccctggcaccaacaccagcaatcaggtggcagtgctgtaccaggacgtgaactgtaccgaagtgcccgtggccattcacgccgatcagctgacacctacatggcgggtgtactccaccggcagcaatgtgtttcagaccagagccggctgtctgatcggagccgagcacgtgaacaatagctacgagtgcgacatccccatcggcgctggcatctgtgccagctaccagacacagacaaacagccccagacgggccagatctgtggccagccagagcatcattgcctacacaatgtctctgggcgccgagaacagcgtggcctactccaacaactctatcgctatccccaccaacttcaccatcagcgtgaccacagagatcctgcctgtgtccatgaccaagaccagcgtggactgcaccatgtacatctgcggcgattccaccgagtgctccaacctgctgctgcagtacggcagcttctgcacccagctgaatagagccctgacagggatcgccgtggaacaggacaagaacacccaagaggtgttcgcccaagtgaagcagatctacaagacccctcctatcaaggacttcggcggcttcaatttcagccagattctgcccgatcctagcaagcccagcaagcggagcttcatcgaggacctgctgttcaacaaagtgacactggccgacgccggcttcatcaagcagtatggcgattgtctgggcgacattgccgccagggatctgatttgcgcccagaagtttaacggactgacagtgctgccaccactgctgaccgatgagatgatcgcccagtacacatctgccctgctggccggcacaatcacaagcggctggacatttggagctggcgccgctctgcagatcccctttgctatgcagatggcctaccggttcaacggcatcggagtgacccagaatgtgctgtacgagaaccagaagctgatcgccaaccagttcaacagcgccatcggcaagatccaggacagcctgagcagcacagcaagcgccctgggaaagctgcaggacgtggtcaaccagaatgcccaggcactgaacaccctggtcaagcagctgtcctccaacttcggcgccatcagctctgtgctgaacgatatcctgagcagactggacccgccggaagccgaggtgcagatcgacagactgatcaccggaaggctgcagtccctgcagacctacgttacccagcagctgatcagagccgccgagattagagcctctgccaatctggccgccaccaagatgtctgagtgtgtgctgggccagagcaagagagtggacttttgcggcaagggctaccacctgatgagcttccctcagtctgcccctcacggcgtggtgtttctgcacgtgacatacgtgcccgctcaagagaagaatttcaccaccgctccagccatctgccacgacggcaaagcccactttcctagagaaggcgtgttcgtgtccaacggcacccattggttcgtgacccagcggaacttctacgagccccagatcatcaccaccgacaacaccttcgtgtctggcaactgcgacgtcgtgatcggcattgtgaacaataccgtgtacgaccctctgcagcccgagctggacagcttcaaagaggaactggataagtactttaagaaccacacaagccccgacgtggacctgggcgatatcagcggaatcaatgccagcgtcgtgaacatccagaaagagatcgaccggctgaacgaggtggccaagaatctgaacgagagcctgatcgacctgcaagaactggggaagtacgagcagtacatcaagggctatatccccgaggctcccagagatggccaggcctatgttcggaaggatggcgagtgggtcctgctgagcacctttctgctggaagtgctgtttcaaggccctggctctcaccaccaccatcaccactgatgaggatcc

SEQ ID NO: 123 - DNA, 3825 bp, Artificial Sequence
  Description of Artificial Sequence: Synthetic polynucleotide
atggattctaagggcagcagccagaagggctccagactgctgctgcttctggtggtgtccaacctcctgctgcctcaaggtgttctggcccagtgtgtgaacctgaccacaagaacccagctgcctccagcctacaccaacagctttaccagaggcgtgtactaccccgacaaggtgttcagatccagcgtgctgcactctacccaggacctgttcctgcctttcttcagcaacgtgacctggttccacgccatccacgtgtccggcaccaatggcaccaagagattcgacaaccccgtgctgcccttcaacgacggggtgtactttgccagcaccgagaagtccaacatcatcagaggctggatcttcggcaccacactggacagcaagacccagagcctgctgatcgtgaacaacgccaccaacgtggtcatcaaagtgtgcgagttccagttctgcaacgaccccttcctgggcgtctactatcacaagaacaacaagagctggatggaaagcgagttccgggtgtacagcagcgccaacaactgcaccttcgagtacgtgtcccagcctttcctgatggacctggaaggcaagcagggcaacttcaagaacctgcgcgagttcgtgttcaagaacatcgacggctacttcaagatctacagcaagcacacccctatcaacctcgtgcgggatctgcctcagggcttctctgctctggaacccctggtggatctgcccatcggcatcaacatcacccggtttcagacactgctggccctgcacagaagctacctgacacctggcgatagcagcagcggatggacagctggtgccgccgcttactatgtgggctacctgcagcctagaaccttcctgctgaagtacaacgagaacggcaccatcaccgacgccgtggattgtgcccttgatcctctgagcgagacaaagtgcaccctgaagtccttcaccgtggaaaagggcatctaccagaccagcaacttccgggtgcagcccaccgaatccatcgtgcggttccccaatatcaccaatctgtgccccttcggcgaggtgttcaatgccaccagattcgcctctgtgtacgcctggaaccggaagcggatcagcaattgcgtggccgactactccgtgctgtacaactccgccagcttcagcaccttcaagtgctacggcgtgtcccctaccaagctgaacgacctgtgcttcacaaacgtgtacgccgacagcttcgtgatccggggagatgaagtgcggcagattgcccctggacagacaggcaagatcgccgactacaactacaagctgcccgacgacttcaccggctgtgtgattgcctggaacagcaacaacctggactccaaagtcggcggcaactacaattacctgtaccggctgttccggaagtccaatctgaagcccttcgagcgggacatctccaccgagatctatcaggccggcagcaccccttgtaacggcgtggaaggcttcaactgctacttcccactgcagtcctacggctttcagcccacaaatggcgtgggctatcagccctacagagtggtggtgctgagcttcgaactgctgcatgcccctgccacagtgtgcggccctaagaaaagcaccaatctcgtgaagaacaaatgcgtgaacttcaacttcaacggcctgaccggcaccggcgtgctgacagagagcaacaagaagttcctgccattccagcagtttggccgggatatcgccgataccacagacgccgttagagatccccagacactggaaatcctggacatcaccccttgcagcttcggcggagtgtctgtgatcacccctggcaccaacaccagcaatcaggtggcagtgctgtaccaggacgtgaactgtaccgaagtgcccgtggccattcacgccgatcagctgacacctacatggcgggtgtactccaccggcagcaatgtgtttcagaccagagccggctgtctgatcggagccgagcacgtgaacaatagctacgagtgcgacatccccatcggcgctggcatctgtgccagctaccagacacagacaaacagccccagacgggccagatctgtggcctctcaatctatcggcggaggctctggatctctgggcgccgaaaattccgtggcctactccaacaactctatcgctatccccaccaacttcaccatcagcgtgaccacagagatcctgcctgtgtccatgaccaagaccagcgtggactgcaccatgtacatctgcggcgattccaccgagtgctccaacctgctgctgcagtacggcagcttctgcacccagctgaatagagccctgacagggatcgccgtggaacaggacaagaacacccaagaggtgttcgcccaagtgaagcagatctacaagacccctcctatcaaggacttcggcggcttcaatttcagccagattctgcccgatcctagcggaggcggcagcggctcttttatcgaggacctgctgttcaacaaagtgacactggccgacgccggcttcatcaagcagtatggcgattgtctgggcgacattgccgccagggatctgatttgcgcccagaagtttaacggactgacagtgctgccaccactgctgaccgatgagatgatcgcccagtacacatctgccctgctggccggcacaatcacaagcggctggacatttggagctggcgccgctctgcagatcccctttgctatgcagatggcctaccggttcaacggcatcggagtgacccagaatgtgctgtacgagaaccagaagctgatcgccaaccagttcaacagcgccatcggcaagatccaggacagcctgagcagcacagcaagcgccctgggaaagctgcaggacgtggtcaaccagaatgcccaggcactgaacaccctggtcaagcagctgtcctccaacttcggcgccatcagctctgtgctgaacgatatcctgagcagactggacccgccggaagccgaggtgcagatcgacagactgatcaccggaaggctgcagtccctgcagacctacgttacccagcagctgatcagagccgccgagattagagcctctgccaatctggccgccaccaagatgtctgagtgtgtgctgggccagagcaagagagtggacttttgcggcaagggctaccacctgatgagcttccctcagtctgcccctcacggcgtggtgtttctgcacgtgacatacgtgcccgctcaagagaagaatttcaccaccgctccagccatctgccacgacggcaaagcccactttcctagagaaggcgtgttcgtgtccaacggcacccattggttcgtgacccagcggaacttctacgagccccagatcatcaccaccgacaacaccttcgtgtctggcaactgcgacgtcgtgatcggcattgtgaacaataccgtgtacgaccctctgcagcccgagctggacagcttcaaagaggaactggataagtactttaagaaccacacaagccccgacgtggacctgggcgatatcagcggaatcaatgccagcgtcgtgaacatccagaaagagatcgaccggctgaacgaggtggccaagaatctgaacgagagcctgatcgacctgcaagaactggggaagtacgagcagtacatcaagggctatatccccgaggctcccagagatggccaggcctatgttcggaaggatggcgagtgggtcctgctgagcacctttctgctggaagtgctgtttcaaggccctggctctcaccaccaccatcaccactgatgaggatcc

SEQ ID NO: 124 - DNA, 3801 bp, Artificial Sequence
  Description of Artificial Sequence: Synthetic polynucleotide
atgtttctgctgaccaccaagcggaccatgttcgtgtttctggtgctgctgcctctggtgtccagccagtgtgtgaacctgaccacaagaacccagctgcctccagcctacaccaacagctttaccagaggcgtgtactaccccgacaaggtgttcagatccagcgtgctgcactctacccaggacctgttcctgcctttcttcagcaacgtgacctggttccacgccatccacgtgtccggcaccaatggcaccaagagattcgacaaccccgtgctgcccttcaacgacggggtgtactttgccagcaccgagaagtccaacatcatcagaggctggatcttcggcaccacactggacagcaagacccagagcctgctgatcgtgaacaacgccaccaacgtggtcatcaaagtgtgcgagttccagttctgcaacgaccccttcctgggcgtctactatcacaagaacaacaagagctggatggaaagcgagttccgggtgtacagcagcgccaacaactgcaccttcgagtacgtgtcccagcctttcctgatggacctggaaggcaagcagggcaacttcaagaacctgcgcgagttcgtgttcaagaacatcgacggctacttcaagatctacagcaagcacacccctatcaacctcgtgcgggatctgcctcagggcttctctgctctggaacccctggtggatctgcccatcggcatcaacatcacccggtttcagacactgctggccctgcacagaagctacctgacacctggcgatagcagcagcggatggacagctggtgccgccgcttactatgtgggctacctgcagcctagaaccttcctgctgaagtacaacgagaacggcaccatcaccgacgccgtggattgtgcccttgatcctctgagcgagacaaagtgcaccctgaagtccttcaccgtggaaaagggcatctaccagaccagcaacttccgggtgcagcccaccgaatccatcgtgcggttccccaatatcaccaatctgtgccccttcggcgaggtgttcaatgccaccagattcgcctctgtgtacgcctggaaccggaagcggatcagcaattgcgtggccgactactccgtgctgtacaactccgccagcttcagcaccttcaagtgctacggcgtgtcccctaccaagctgaacgacctgtgcttcacaaacgtgtacgccgacagcttcgtgatccggggagatgaagtgcggcagattgcccctggacagacaggcaagatcgccgactacaactacaagctgcccgacgacttcaccggctgtgtgattgcctggaacagcaacaacctggactccaaagtcggcggcaactacaattacctgtaccggctgttccggaagtccaatctgaagcccttcgagcgggacatctccaccgagatctatcaggccggcagcaccccttgtaacggcgtggaaggcttcaactgctacttcccactgcagtcctacggctttcagcccacaaatggcgtgggctatcagccctacagagtggtggtgctgagcttcgaactgctgcatgcccctgccacagtgtgcggccctaagaaaagcaccaatctcgtgaagaacaaatgcgtgaacttcaacttcaacggcctgaccggcaccggcgtgctgacagagagcaacaagaagttcctgccattccagcagtttggccgggatatcgccgataccacagacgccgttagagatccccagacactggaaatcctggacatcaccccttgcagcttcggcggagtgtctgtgatcacccctggcaccaacaccagcaatcaggtggcagtgctgtaccaggacgtgaactgtaccgaagtgcccgtggccattcacgccgatcagctgacacctacatggcgggtgtactccaccggcagcaatgtgtttcagaccagagccggctgtctgatcggagccgagcacgtgaacaatagctacgagtgcgacatccccatcggcgctggcatctgtgccagctaccagacacagacaaacagccccagacgggccagatctgtggcctctcaatctatcggcggaggctctggatctctgggcgccgaaaattccgtggcctactccaacaactctatcgctatccccaccaacttcaccatcagcgtgaccacagagatcctgcctgtgtccatgaccaagaccagcgtggactgcaccatgtacatctgcggcgattccaccgagtgctccaacctgctgctgcagtacggcagcttctgcacccagctgaatagagccctgacagggatcgccgtggaacaggacaagaacacccaagaggtgttcgcccaagtgaagcagatctacaagacccctcctatcaaggacttcggcggcttcaatttcagccagattctgcccgatcctagcggaggcggcagcggctcttttatcgaggacctgctgttcaacaaagtgacactggccgacgccggcttcatcaagcagtatggcgattgtctgggcgacattgccgccagggatctgatttgcgcccagaagtttaacggactgacagtgctgccaccactgctgaccgatgagatgatcgcccagtacacatctgccctgctggccggcacaatcacaagcggctggacatttggagctggcgccgctctgcagatcccctttgctatgcagatggcctaccggttcaacggcatcggagtgacccagaatgtgctgtacgagaaccagaagctgatcgccaaccagttcaacagcgccatcggcaagatccaggacagcctgagcagcacagcaagcgccctgggaaagctgcaggacgtggtcaaccagaatgcccaggcactgaacaccctggtcaagcagctgtcctccaacttcggcgccatcagctctgtgctgaacgatatcctgagcagactggacccgccggaagccgaggtgcagatcgacagactgatcaccggaaggctgcagtccctgcagacctacgttacccagcagctgatcagagccgccgagattagagcctctgccaatctggccgccaccaagatgtctgagtgtgtgctgggccagagcaagagagtggacttttgcggcaagggctaccacctgatgagcttccctcagtctgcccctcacggcgtggtgtttctgcacgtgacatacgtgcccgctcaagagaagaatttcaccaccgctccagccatctgccacgacggcaaagcccactttcctagagaaggcgtgttcgtgtccaacggcacccattggttcgtgacccagcggaacttctacgagccccagatcatcaccaccgacaacaccttcgtgtctggcaactgcgacgtcgtgatcggcattgtgaacaataccgtgtacgaccctctgcagcccgagctggacagcttcaaagaggaactggataagtactttaagaaccacacaagccccgacgtggacctgggcgatatcagcggaatcaatgccagcgtcgtgaacatccagaaagagatcgaccggctgaacgaggtggccaagaatctgaacgagagcctgatcgacctgcaagaactggggaagtacgagcagtacatcaagggctatatccccgaggctcccagagatggccaggcctatgttcggaaggatggcgagtgggtcctgctgagcacctttctgctggaagtgctgtttcaaggccctggctctcaccaccaccatcaccactgatgaggatcc

SEQ ID NO: 125 - protein, 1273 aa, Artificial Sequence
  Description of Artificial Sequence: Synthetic polypeptide
MFVFLVLLPLVSSQCVNLTTRTQLPPAYTNSFTRGVYYPDKVFRSSVLHSTQDLFLPFFSNVTWFHAIHVSGTNGTKRFDNPVLPFNDGVYFASTEKSNIIRGWIFGTTLDSKTQSLLIVNNATNVVIKVCEFQFCNDPFLGVYYHKNNKSWMESEFRVYSSANNCTFEYVSQPFLMDLEGKQGNFKNLREFVFKNIDGYFKIYSKHTPINLVRDLPQGFSALEPLVDLPIGINITRFQTLLALHRSYLTPGDSSSGWTAGAAAYYVGYLQPRTFLLKYNENGTITDAVDCALDPLSETKCTLKSFTVEKGIYQTSNFRVQPTESIVRFPNITNLCPFGEVFNATRFASVYAWNRKRISNCVADYSVLYNSASFSTFKCYGVCPTKLNDLCFTNVYADSFVIRGDEVRQIAPGQTGKIADYNYKLPDDFTGCVIAWNSNNLDSKVGGNYNYLYRLFRKSNLKPFERDISTEIYQAGSTPCNGVEGFNCYFPLQSYGFQPTNGVGYQPYRVVVLSFELLHAPATVCGPKKSTNLVKNKCVNFNFNGLTGTGVLTESNKKFLPFQQFGRDIADTTDAVRDPQTLEILDITPCSFGGVSVITPGTNTSNQVAVLYQDVNCTEVPVAIHADQLTPTWRVYSTGSNVFQTRAGCLIGAEHVNNSYECDIPIGAGICASYQTQTNSPRRARSVASQSIIAYTMSLGAENSVAYSNNSIAIPTNFTISVTTEILPVSMTKTSVDCTMYICGDSTECSNLLLQYGSFCTQLNRALTGIAVEQDKNTQEVFAQVKQIYKTPPIKDFGGFNFSQILPDPSKPSKRSFIEDLLFNKVTLADAGFIKQYGDCLGDIAARDLICAQKFNGLTVLPPLLTDEMIAQYTSALLAGTITSGWTFGAGAALQIPFAMQMAYRFNGIGVTQNVLYENQKLIANQFNSAIGKIQDSLSSTASALGKLQDVVNQNAQALNTLVKQLSSNFGAISSVLNDILSRLCPPEAEVQIDRLITGRLQSLQTYVTQQLIRAAEIRASANLAATKMSECVLGQSKRVDFCGKGYHLMSFPQSAPHGVVFLHVTYVPAQEKNFTTAPAICHDGKAHFPREGVFVSNGTHWFVTQRNFYEPQIITTDNTFVSGNCDVVIGIVNNTVYDPLQPELDSFKEELDKYFKNHTSPDVDLGDISGINASVVNIQKEIDRLNEVAKNLNESLIDLQELGKYEQYIKWPWYIWLGFIAGLIAIVMVTIMLCCMTSCCSCLKGCCSCGSCCKFDEDDSEPVLKGVKLHYT

SEQ ID NO: 126 - DNA, 1332 bp, Artificial Sequence
  Description of Artificial Sequence: Synthetic polynucleotide
atgcctatgggatctctgcagcctctggccacactgtacctgctgggaatgctggtggctagcgtgctggccagagttcagcctaccgagagcatcgtgcggttccccaacatcaccaatctgtgccctttcggcgaggtgttcaatgccaccagattcgccagcgtgtacgcctggaaccggaagagaatcagcaactgcgtggccgactacagcgtgctgtacaacagcgccagcttcagcaccttcaagtgctacggcgtgtcccctaccaagctgaacgacctgtgcttcaccaatgtgtacgccgacagcttcgtgatccggggagatgaagtgcggcagattgcccctggacagacaggcaagatcgccgattacaactacaagctgcccgacgacttcaccggctgtgtgatcgcctggaatagcaacaacctggacagcaaagtcggcggcaactacaactacctgtaccggctgttccggaagtccaacctgaagcctttcgagcgggacatcagcaccgaaatctaccaggccggcagcaccccttgcaatggcgtggaaggcttcaactgctacttcccactgcagtcctacggcttccagcctacaaacggcgtgggctaccagccttacagagtggtggtgctgagcttcgagctgctgcatgctcctgccacagtgtgcggccctaagaaaagcaccaacctggtcaagaacaaatgcgtgaacttcggtggcggaggatccggcgaatctcaagtccggcagcagttcagcaaggacatcgagaagctgctgaacgagcaagtgaacaaagagatgcagagcagcaacctgtacatgagcatgtccagctggtgctacacccacagccttgatggcgccggactgttcctgtttgatcacgccgccgaggaatacgagcacgccaagaagctgatcatcttcctgaacgagaacaacgtgcccgtgcagctgaccagcatttctgcccctgagcacaagttcgagggcctgacacagattttccagaaggcctacgaacacgagcagcacatcagcgagagcatcaacaacatcgtggaccacgccatcaaaagcaaggatcacgccaccttcaactttctgcagtggtacgtggccgaacagcacgaggaagaggtgctgtttaaggacatcctggacaagatcgagctgatcggcaacgagaaccacggcctgtatctggccgaccagtacgtgaagggaatcgccaagagccgcaagagcctggaagtcctgtttcaaggccctggcagccaccaccaccatcaccactgatga

SEQ ID NO: 127 - DNA, 1323 bp, Artificial Sequence
  Description of Artificial Sequence: Synthetic polynucleotide
atgcctatgggatctctgcagcctctggccacactgtacctgctgggaatgctggtggctagcgtgctggccagagttcagcctaccgagagcatcgtgcggttccccaacatcaccaatctgtgccctttcggcgaggtgttcaatgccaccagattcgccagcgtgtacgcctggaaccggaagagaatcagcaactgcgtggccgactacagcgtgctgtacaacagcgccagcttcagcaccttcaagtgctacggcgtgtcccctaccaagctgaacgacctgtgcttcaccaatgtgtacgccgacagcttcgtgatccggggagatgaagtgcggcagattgcccctggacagacaggcaagatcgccgattacaactacaagctgcccgacgacttcaccggctgtgtgatcgcctggaatagcaacaacctggacagcaaagtcggcggcaactacaactacctgtaccggctgttccggaagtccaacctgaagcctttcgagcgggacatcagcaccgaaatctaccaggccggcagcaccccttgcaatggcgtggaaggcttcaactgctacttcccactgcagtcctacggcttccagcctacaaacggcgtgggctaccagccttacagagtggtggtgctgagcttcgagctgctgcatgctcctgccacagtgtgcggccctaagaaaagcaccaacctggtcaagaacaaatgcgtgaacttcggcggaggatccggcggaggcggttctggcctgagcaaggatatcatcaagctgctgaacgagcaagtgaacaaagaaatgaactcctccaacctgtacatgagcatgagcagctggtgttacacccacagccttgatggcgccggactgttcctgtttgatcacgccgccgaggaatacgagcacgccaagaagctgatcatcttcctgaacgagaacaatgtgcccgtgcagctgaccagcattagcgccccagagcacaagttcgagggcctgacacaaatctttcagaaggcctacgaacacgagcagcacatctccgagagcatcaacaacatcgtggaccacgccattaagtccaaggatcacgccaccttcaattttctgcagtggtacgtggccgaacagcacgaggaagaagtgctgttcaaggacatcctggacaagattgagctgatcggcaacgagaaccacggcctgtatctggccgaccagtacgtgaagggaatcgccaagagccggaagtccctggaagtcctgtttcaaggccctggcagccaccaccaccatcaccactgatga

SEQ ID NO: 128 - DNA, 4344 bp, Artificial Sequence
  Description of Artificial Sequence: Synthetic polynucleotide
atgcctatgggatctctgcagcctctggccacactgtacctgctgggaatgctggtggctagcgtgctggcccagtgtgtgaacctgaccaccagaacacagctgcctccagcctacaccaacagctttaccagaggcgtgtactaccccgacaaggtgttcagatccagcgtgctgcactctacccaggacctgttcctgcctttcttcagcaacgtgacctggttccacgccatccacgtgtccggcaccaatggcaccaagagattcgacaaccccgtgctgcccttcaacgacggggtgtactttgccagcaccgagaagtccaacatcatcagaggctggatcttcggcaccacactggacagcaagacccagagcctgctgatcgtgaacaacgccaccaacgtggtcatcaaagtgtgcgagttccagttctgcaacgaccccttcctgggcgtctactaccacaagaacaacaagagctggatggaaagcgagttccgggtgtacagcagcgccaacaactgcaccttcgagtacgtgtcccagcctttcctgatggacctggaaggcaagcagggcaacttcaagaacctgcgcgagttcgtgttcaagaacatcgacggctacttcaagatctacagcaagcacacccctatcaacctcgtgcgggatctgcctcagggcttctctgctctggaacccctggtggatctgcccatcggcatcaacatcacccggtttcagacactgctggccctgcacagaagctacctgacacctggcgatagcagcagcggatggacagctggtgccgccgcttactatgtgggctacctgcagcctagaaccttcctgctgaagtacaacgagaacggcaccatcaccgacgccgtggattgtgcccttgatcctctgagcgagacaaagtgcaccctgaagtccttcaccgtggaaaagggcatctaccagaccagcaacttccgggtgcagcccaccgaatccatcgtgcggttccccaatatcaccaatctgtgccccttcggcgaggtgttcaatgccaccagattcgcctctgtgtacgcctggaaccggaagcggatcagcaattgcgtggccgactactccgtgctgtacaactccgccagcttcagcaccttcaagtgctacggcgtgtcccctaccaagctgaacgacctgtgcttcacaaacgtgtacgccgacagcttcgtgatccggggagatgaagtgcggcagattgcccctggacagacaggcaagatcgccgactacaactacaagctgcccgacgacttcaccggctgtgtgattgcctggaacagcaacaacctggactccaaagtcggcggcaactacaattacctgtaccggctgttccggaagtccaatctgaagcccttcgagcgggacatctccaccgagatctatcaggccggcagcaccccttgtaacggcgtggaaggcttcaactgctacttcccactgcagtcctacggctttcagcccacaaatggcgtgggctatcagccctacagagtggtggtgctgagcttcgaactgctgcatgcccctgccacagtgtgcggccctaagaaaagcaccaatctcgtgaagaacaaatgcgtgaacttcaacttcaacggcctgaccggcaccggcgtgctgacagagagcaacaagaagttcctgccattccagcagtttggccgggatatcgccgataccacagacgccgttagagatccccagacactggaaatcctggacatcaccccttgcagcttcggcggagtgtctgtgatcacccctggcaccaacaccagcaatcaggtggcagtgctgtaccaggacgtgaactgtaccgaagtgcccgtggccattcacgccgatcagctgacacctacatggcgggtgtactccaccggcagcaatgtgtttcagaccagagccggctgtctgatcggagccgagcacgtgaacaatagctacgagtgcgacatccccatcggcgctggcatctgtgccagctaccagacacagacaaacagccctggcagcgcctcttctgtggccagccagagcatcattgcctacacaatgtctctgggcgccgagaacagcgtggcctactccaacaactctatcgctatccccaccaacttcaccatcagcgtgaccacagagatcctgcctgtgtccatgaccaagaccagcgtggactgcaccatgtacatctgcggcgattccaccgagtgctccaacctgctgctgcagtacggcagcttctgcacccagctgaatagagccctgacagggatcgccgtggaacaggacaagaacacccaagaggtgttcgcccaagtgaagcagatctacaagacccctcctatcaaggacttcggcggcttcaatttcagccagattctgcccgatcctagcaagcccagcaagcggagcttcatcgaggacctgctgttcaacaaagtgacactggccgacgccggcttcatcaagcagtatggcgattgtctgggcgacattgccgccagggatctgatttgcgcccagaagtttaacggactgacagtgctgcctcctctgctgaccgatgagatgatcgcccagtacacatctgccctgctggccggcacaatcacaagcggctggacatttggagctggcgccgctctgcagatcccctttgctatgcagatggcctaccggttcaacggcatcggagtgacccagaatgtgctgtacgagaaccagaagctgatcgccaaccagttcaacagcgccatcggcaagatccaggacagcctgagcagcacagcaagcgccctgggaaagctgcaggacgtggtcaaccagaatgcccaggcactgaacaccctggtcaagcagctgtcctccaacttcggcgccatcagctctgtgctgaacgatatcctgagcagactggaccctcctgaggccgaggtgcagatcgacagactgatcacaggcagactgcagagcctccagacatacgtgacccagcagctgatcagagccgccgagattagagcctctgccaatctggccgccaccaagatgtctgagtgtgtgctgggccagagcaagagagtggacttttgcggcaagggctaccacctgatgagcttccctcagtctgcccctcacggcgtggtgtttctgcacgtgacatatgtgcccgctcaagagaagaatttcaccaccgctccagccatctgccacgacggcaaagcccactttcctagagaaggcgtgttcgtgtccaacggcacccattggttcgtgacacagcggaacttctacgagccccagatcatcaccaccgacaacaccttcgtgtctggcaactgcgacgtcgtgatcggcattgtgaacaataccgtgtacgaccctctgcagcccgagctggacagcttcaaagaggaactggacaagtactttaagaaccacacaagccccgacgtggacctgggcgatatcagcggaatcaatgccagcgtcgtgaacatccagaaagagatcgaccggctgaacgaggtggccaagaatctgaacgagagcctgatcgacctgcaagaactggggaagtacgagcaaggcagcggctacattcccgaggctcctagagatggccaggcctacgttagaaaggacggcgagtgggtcctgctgagcacctttctgggaagatctggtggcggaggatccggcgaatctcaagtccggcagcagttcagcaaggacatcgagaagctgctgaacgagcaagtgaacaaagagatgcagagcagcaacctgtacatgagcatgtccagctggtgctacacccacagccttgatggcgccggactgttcctgtttgatcacgccgccgaggaatacgagcacgccaagaagctgatcatcttcctgaacgagaacaacgtgcccgtgcagctgaccagcatttctgcccctgagcacaagttcgagggcctgacacagattttccagaaggcctacgaacacgagcagcacatcagcgagagcatcaacaacatcgtggaccacgccatcaaaagcaaggatcacgccaccttcaactttctgcagtggtacgtggccgaacagcacgaggaagaggtgctgtttaaggacatcctggacaagatcgagctgatcggcaacgagaaccacggcctgtatctggccgaccagtacgtgaagggaatcgccaagagccgcaagagcctggaagtcctgtttcaaggccctggcagccaccaccaccatcaccactgatga

SEQ ID NO: 129 - DNA, 4335 bp, Artificial Sequence
  Description of Artificial Sequence: Synthetic polynucleotide
atgcctatgggatctctgcagcctctggccacactgtacctgctgggaatgctggtggctagcgtgctggcccagtgtgtgaacctgaccaccagaacacagctgcctccagcctacaccaacagctttaccagaggcgtgtactaccccgacaaggtgttcagatccagcgtgctgcactctacccaggacctgttcctgcctttcttcagcaacgtgacctggttccacgccatccacgtgtccggcaccaatggcaccaagagattcgacaaccccgtgctgcccttcaacgacggggtgtactttgccagcaccgagaagtccaacatcatcagaggctggatcttcggcaccacactggacagcaagacccagagcctgctgatcgtgaacaacgccaccaacgtggtcatcaaagtgtgcgagttccagttctgcaacgaccccttcctgggcgtctactaccacaagaacaacaagagctggatggaaagcgagttccgggtgtacagcagcgccaacaactgcaccttcgagtacgtgtcccagcctttcctgatggacctggaaggcaagcagggcaacttcaagaacctgcgcgagttcgtgttcaagaacatcgacggctacttcaagatctacagcaagcacacccctatcaacctcgtgcgggatctgcctcagggcttctctgctctggaacccctggtggatctgcccatcggcatcaacatcacccggtttcagacactgctggccctgcacagaagctacctgacacctggcgatagcagcagcggatggacagctggtgccgccgcttactatgtgggctacctgcagcctagaaccttcctgctgaagtacaacgagaacggcaccatcaccgacgccgtggattgtgcccttgatcctctgagcgagacaaagtgcaccctgaagtccttcaccgtggaaaagggcatctaccagaccagcaacttccgggtgcagcccaccgaatccatcgtgcggttccccaatatcaccaatctgtgccccttcggcgaggtgttcaatgccaccagattcgcctctgtgtacgcctggaaccggaagcggatcagcaattgcgtggccgactactccgtgctgtacaactccgccagcttcagcaccttcaagtgctacggcgtgtcccctaccaagctgaacgacctgtgcttcacaaacgtgtacgccgacagcttcgtgatccggggagatgaagtgcggcagattgcccctggacagacaggcaagatcgccgactacaactacaagctgcccgacgacttcaccggctgtgtgattgcctggaacagcaacaacctggactccaaagtcggcggcaactacaattacctgtaccggctgttccggaagtccaatctgaagcccttcgagcgggacatctccaccgagatctatcaggccggcagcaccccttgtaacggcgtggaaggcttcaactgctacttcccactgcagtcctacggctttcagcccacaaatggcgtgggctatcagccctacagagtggtggtgctgagcttcgaactgctgcatgcccctgccacagtgtgcggccctaagaaaagcaccaatctcgtgaagaacaaatgcgtgaacttcaacttcaacggcctgaccggcaccggcgtgctgacagagagcaacaagaagttcctgccattccagcagtttggccgggatatcgccgataccacagacgccgttagagatccccagacactggaaatcctggacatcaccccttgcagcttcggcggagtgtctgtgatcacccctggcaccaacaccagcaatcaggtggcagtgctgtaccaggacgtgaactgtaccgaagtgcccgtggccattcacgccgatcagctgacacctacatggcgggtgtactccaccggcagcaatgtgtttcagaccagagccggctgtctgatcggagccgagcacgtgaacaatagctacgagtgcgacatccccatcggcgctggcatctgtgccagctaccagacacagacaaacagccctggcagcgcctcttctgtggccagccagagcatcattgcctacacaatgtctctgggcgccgagaacagcgtggcctactccaacaactctatcgctatccccaccaacttcaccatcagcgtgaccacagagatcctgcctgtgtccatgaccaagaccagcgtggactgcaccatgtacatctgcggcgattccaccgagtgctccaacctgctgctgcagtacggcagcttctgcacccagctgaatagagccctgacagggatcgccgtggaacaggacaagaacacccaagaggtgttcgcccaagtgaagcagatctacaagacccctcctatcaaggacttcggcggcttcaatttcagccagattctgcccgatcctagcaagcccagcaagcggagcttcatcgaggacctgctgttcaacaaagtgacactggccgacgccggcttcatcaagcagtatggcgattgtctgggcgacattgccgccagggatctgatttgcgcccagaagtttaacggactgacagtgctgcctcctctgctgaccgatgagatgatcgcccagtacacatctgccctgctggccggcacaatcacaagcggctggacatttggagctggcgccgctctgcagatcccctttgctatgcagatggcctaccggttcaacggcatcggagtgacccagaatgtgctgtacgagaaccagaagctgatcgccaaccagttcaacagcgccatcggcaagatccaggacagcctgagcagcacagcaagcgccctgggaaagctgcaggacgtggtcaaccagaatgcccaggcactgaacaccctggtcaagcagctgtcctccaacttcggcgccatcagctctgtgctgaacgatatcctgagcagactggaccctcctgaggccgaggtgcagatcgacagactgatcacaggcagactgcagagcctccagacatacgtgacccagcagctgatcagagccgccgagattagagcctctgccaatctggccgccaccaagatgtctgagtgtgtgctgggccagagcaagagagtggacttttgcggcaagggctaccacctgatgagcttccctcagtctgcccctcacggcgtggtgtttctgcacgtgacatatgtgcccgctcaagagaagaatttcaccaccgctccagccatctgccacgacggcaaagcccactttcctagagaaggcgtgttcgtgtccaacggcacccattggttcgtgacacagcggaacttctacgagccccagatcatcaccaccgacaacaccttcgtgtctggcaactgcgacgtcgtgatcggcattgtgaacaataccgtgtacgaccctctgcagcccgagctggacagcttcaaagaggaactggacaagtactttaagaaccacacaagccccgacgtggacctgggcgatatcagcggaatcaatgccagcgtcgtgaacatccagaaagagatcgaccggctgaacgaggtggccaagaatctgaacgagagcctgatcgacctgcaagaactggggaagtacgagcaaggcagcggctacattcccgaggctcctagagatggccaggcctacgttagaaaggacggcgagtgggtcctgctgagcacctttctgggaagatctggcggaggatccggcggaggcggttctggcctgagcaaggatatcatcaagctgctgaacgagcaagtgaacaaagaaatgaactcctccaacctgtacatgagcatgagcagctggtgttacacccacagccttgatggcgccggactgttcctgtttgatcacgccgccgaggaatacgagcacgccaagaagctgatcatcttcctgaacgagaacaatgtgcccgtgcagctgaccagcattagcgccccagagcacaagttcgagggcctgacacaaatctttcagaaggcctacgaacacgagcagcacatctccgagagcatcaacaacatcgtggaccacgccattaagtccaaggatcacgccaccttcaattttctgcagtggtacgtggccgaacagcacgaggaagaagtgctgttcaaggacatcctggacaagattgagctgatcggcaacgagaaccacggcctgtatctggccgaccagtacgtgaagggaatcgccaagagccggaagtccctggaagtcctgtttcaaggccctggcagccaccaccaccatcaccactgatga

SEQ ID NO: 130 - DNA, 765 bp, Artificial Sequence
  Description of Artificial Sequence: Synthetic polynucleotide
atgcctatgggatctctgcagcctctggccacactgtacctgctgggaatgctggtggctagcgtgctggccatctaccaggccggcagcaccccttgcaatggcgtggaaggcttcaactgctacttcccactgcagtcctacggcttccagcctacaaacggcgtgggctacggtggcggaggatccggcgaatctcaagtccggcagcagttcagcaaggacatcgagaagctgctgaacgagcaagtgaacaaagagatgcagagcagcaacctgtacatgagcatgtccagctggtgctacacccacagccttgatggcgccggactgttcctgtttgatcacgccgccgaggaatacgagcacgccaagaagctgatcatcttcctgaacgagaacaacgtgcccgtgcagctgaccagcatttctgcccctgagcacaagttcgagggcctgacacagattttccagaaggcctacgaacacgagcagcacatcagcgagagcatcaacaacatcgtggaccacgccatcaaaagcaaggatcacgccaccttcaactttctgcagtggtacgtggccgaacagcacgaggaagaggtgctgtttaaggacatcctggacaagatcgagctgatcggcaacgagaaccacggcctgtatctggccgaccagtacgtgaagggaatcgccaagagccgcaagagcctggaagtcctgtttcaaggccctggcagccaccaccaccatcaccactgatga

SEQ ID NO: 131 - DNA, 756 bp, Artificial Sequence
  Description of Artificial Sequence: Synthetic polynucleotide
atgcctatgggatctctgcagcctctggccacactgtacctgctgggaatgctggtggctagcgtgctggccatctaccaggccggcagcaccccttgcaatggcgtggaaggcttcaactgctacttcccactgcagtcctacggcttccagcctacaaacggcgtgggctacggcggaggatccggcggaggcggttctggcctgagcaaggatatcatcaagctgctgaacgagcaagtgaacaaagaaatgaactcctccaacctgtacatgagcatgagcagctggtgttacacccacagccttgatggcgccggactgttcctgtttgatcacgccgccgaggaatacgagcacgccaagaagctgatcatcttcctgaacgagaacaatgtgcccgtgcagctgaccagcattagcgccccagagcacaagttcgagggcctgacacaaatctttcagaaggcctacgaacacgagcagcacatctccgagagcatcaacaacatcgtggaccacgccattaagtccaaggatcacgccaccttcaattttctgcagtggtacgtggccgaacagcacgaggaagaagtgctgttcaaggacatcctggacaagattgagctgatcggcaacgagaaccacggcctgtatctggccgaccagtacgtgaagggaatcgccaagagccggaagtccctggaagtcctgtttcaaggccctggcagccaccaccaccatcaccactgatga

SEQ ID NO: 132 - DNA, 969 bp, Artificial Sequence
  Description of Artificial Sequence: Synthetic polynucleotide
atgcctatgggatctctgcagcctctggccacactgtacctgctgggaatgctggtggctagcgtgctggccatctaccaggccggcagcaccccttgcaatggcgtggaaggcttcaactgctacttcccactgcagtcctacggcttccagcctacaaacggcgtgggctacatctaccaggccggcagcaccccttgcaatggcgtggaaggcttcaactgctacttcccactgcagtcctacggcttccagcctacaaacggcgtgggctacatctaccaggccggcagcaccccttgcaatggcgtggaaggcttcaactgctacttcccactgcagtcctacggcttccagcctacaaacggcgtgggctacggtggcggaggatccggcgaatctcaagtccggcagcagttcagcaaggacatcgagaagctgctgaacgagcaagtgaacaaagagatgcagagcagcaacctgtacatgagcatgtccagctggtgctacacccacagccttgatggcgccggactgttcctgtttgatcacgccgccgaggaatacgagcacgccaagaagctgatcatcttcctgaacgagaacaacgtgcccgtgcagctgaccagcatttctgcccctgagcacaagttcgagggcctgacacagattttccagaaggcctacgaacacgagcagcacatcagcgagagcatcaacaacatcgtggaccacgccatcaaaagcaaggatcacgccaccttcaactttctgcagtggtacgtggccgaacagcacgaggaagaggtgctgtttaaggacatcctggacaagatcgagctgatcggcaacgagaaccacggcctgtatctggccgaccagtacgtgaagggaatcgccaagagccgcaagagcctggaagtcctgtttcaaggccctggcagccaccaccaccatcaccactgatga

SEQ ID NO: 133 - DNA, 960 bp, Artificial Sequence
  Description of Artificial Sequence: Synthetic polynucleotide
atgcctatgggatctctgcagcctctggccacactgtacctgctgggaatgctggtggctagcgtgctggccatctaccaggccggcagcaccccttgcaatggcgtggaaggcttcaactgctacttcccactgcagtcctacggcttccagcctacaaacggcgtgggctacatctaccaggccggcagcaccccttgcaatggcgtggaaggcttcaactgctacttcccactgcagtcctacggcttccagcctacaaacggcgtgggctacatctaccaggccggcagcaccccttgcaatggcgtggaaggcttcaactgctacttcccactgcagtcctacggcttccagcctacaaacggcgtgggctacggcggaggatccggcggaggcggttctggcctgagcaaggatatcatcaagctgctgaacgagcaagtgaacaaagaaatgaactcctccaacctgtacatgagcatgagcagctggtgttacacccacagccttgatggcgccggactgttcctgtttgatcacgccgccgaggaatacgagcacgccaagaagctgatcatcttcctgaacgagaacaatgtgcccgtgcagctgaccagcattagcgccccagagcacaagttcgagggcctgacacaaatctttcagaaggcctacgaacacgagcagcacatctccgagagcatcaacaacatcgtggaccacgccattaagtccaaggatcacgccaccttcaattttctgcagtggtacgtggccgaacagcacgaggaagaagtgctgttcaaggacatcctggacaagattgagctgatcggcaacgagaaccacggcctgtatctggccgaccagtacgtgaagggaatcgccaagagccggaagtccctggaagtcctgtttcaaggccctggcagccaccaccaccatcaccactgatga

SEQ ID NO: 134 - protein, 1244 aa, Artificial Sequence
  Description of Artificial Sequence: Synthetic polypeptide
MDSKGSSQKGSRLLLLLVVSNLLLPQGVLAQCVNLTTRTQLPPAYTNSFTRGVYYPDKVFRSSVLHSTQDLFLPFFSNVTWFHAIHVSGTNGTKRFDNPVLPFNDGVYFASTEKSNIIRGWIFGTTLDSKTQSLLIVNNATNVVIKVCEFQFCNDPFLGVYYHKNNKSWMESEFRVYSSANNCTFEYVSQPFLMDLEGKQGNFKNLREFVFKNIDGYFKIYSKHTPINLVRDLPQGFSALEPLVDLPIGINITRFQTLLALHRSYLTPGDSSSGWTAGAAAYYVGYLQPRTFLLKYNENGTITDAVDCALDPLSETKCTLKSFTVEKGIYQTSNFRVQPTESIVRFPNITNLCPFGEVFNATRFASVYAWNRKRISNCVADYSVLYNSASFSTFKCYGVSPTKLNDLCFTNVYADSFVIRGDEVRQIAPGQTGKIADYNYKLPDDFTGCVIAWNSNNLDSKVGGNYNYLYRLFRKSNLKPFERDISTEIYQAGSTPCNGVEGFNCYFPLQSYGFQPTNGVGYQPYRVVVLSFELLHAPATVCGPKKSTNLVKNKCVNFNFNGLTGTGVLTESNKKFLPFQQFGRDIADTTDAVRDPQTLEILDITPCSFGGVSVITPGTNTSNQVAVLYQDVNCTEVPVAIHADQLTPTWRVYSTGSNVFQTRAGCLIGAEHVNNSYECDIPIGAGICASYQTQTNSPRRARSVASQSIIAYTMSLGAENSVAYSNNSIAIPTNFTISVTTEILPVSMTKTSVDCTMYICGDSTECSNLLLQYGSFCTQLNRALTGIAVEQDKNTQEVFAQVKQIYKTPPIKDFGGFNFSQILPDPSKPSKRSFIEDLLFNKVTLADAGFIKQYGDCLGDIAARDLICAQKFNGLTVLPPLLTDEMIAQYTSALLAGTITSGWTFGAGAALQIPFAMQMAYRFNGIGVTQNVLYENQKLIANQFNSAIGKIQDSLSSTASALGKLQDVVNQNAQALNTLVKQLSSNFGAISSVLNDILSRLDKVEAEVQIDRLITGRLQSLQTYVTQQLIRAAEIRASANLAATKMSECVLGQSKRVDFCGKGYHLMSFPQSAPHGVVFLHVTYVPAQEKNFTTAPAICHDGKAHFPREGVFVSNGTHWFVTQRNFYEPQIITTDNTFVSGNCDVVIGIVNNTVYDPLQPELDSFKEELDKYFKNHTSPDVDLGDISGINASVVNIQKEIDRLNEVAKNLNESLIDLQELGKYEQYIKLEVLFQGPGSHHHHHH

SEQ ID NO: 135 - protein, 1236 aa, Artificial Sequence
  Description of Artificial Sequence: Synthetic polypeptide
MFLLTTKRTMFVFLVLLPLVSSQCVNLTTRTQLPPAYTNSFTRGVYYPDKVFRSSVLHSTQDLFLPFFSNVTWFHAIHVSGTNGTKRFDNPVLPFNDGVYFASTEKSNIIRGWIFGTTLDSKTQSLLIVNNATNVVIKVCEFQFCNDPFLGVYYHKNNKSWMESEFRVYSSANNCTFEYVSQPFLMDLEGKQGNFKNLREFVFKNIDGYFKIYSKHTPINLVRDLPQGFSALEPLVDLPIGINITRFQTLLALHRSYLTPGDSSSGWTAGAAAYYVGYLQPRTFLLKYNENGTITDAVDCALDPLSETKCTLKSFTVEKGIYQTSNFRVQPTESIVRFPNITNLCPFGEVFNATRFASVYAWNRKRISNCVADYSVLYNSASFSTFKCYGVSPTKLNDLCFTNVYADSFVIRGDEVRQIAPGQTGKIADYNYKLPDDFTGCVIAWNSNNLDSKVGGNYNYLYRLFRKSNLKPFERDISTEIYQAGSTPCNGVEGFNCYFPLQSYGFQPTNGVGYQPYRVVVLSFELLHAPATVCGPKKSTNLVKNKCVNFNFNGLTGTGVLTESNKKFLPFQQFGRDIADTTDAVRDPQTLEILDITPCSFGGVSVITPGTNTSNQVAVLYQDVNCTEVPVAIHADQLTPTWRVYSTGSNVFQTRAGCLIGAEHVNNSYECDIPIGAGICASYQTQTNSPRRARSVASQSIIAYTMSLGAENSVAYSNNSIAIPTNFTISVTTEILPVSMTKTSVDCTMYICGDSTECSNLLLQYGSFCTQLNRALTGIAVEQDKNTQEVFAQVKQIYKTPPIKDFGGFNFSQILPDPSKPSKRSFIEDLLFNKVTLADAGFIKQYGDCLGDIAARDLICAQKFNGLTVLPPLLTDEMIAQYTSALLAGTITSGWTFGAGAALQIPFAMQMAYRFNGIGVTQNVLYENQKLIANQFNSAIGKIQDSLSSTASALGKLQDVVNQNAQALNTLVKQLSSNFGAISSVLNDILSRLDKVEAEVQIDRLITGRLQSLQTYVTQQLIRAAEIRASANLAATKMSECVLGQSKRVDFCGKGYHLMSFPQSAPHGVVFLHVTYVPAQEKNFTTAPAICHDGKAHFPREGVFVSNGTHWFVTQRNFYEPQIITTDNTFVSGNCDVVIGIVNNTVYDPLQPELDSFKEELDKYFKNHTSPDVDLGDISGINASVVNIQKEIDRLNEVAKNLNESLIDLQELGKYEQYIKLEVLFQGPGSHHHHHH

SEQ ID NO: 136 - protein, 1244 aa, Artificial Sequence
  Description of Artificial Sequence: Synthetic polypeptide
MDSKGSSQKGSRLLLLLVVSNLLLPQGVLAQCVNLTTRTQLPPAYTNSFTRGVYYPDKVFRSSVLHSTQDLFLPFFSNVTWFHAIHVSGTNGTKRFDNPVLPFNDGVYFASTEKSNIIRGWIFGTTLDSKTQSLLIVNNATNVVIKVCEFQFCNDPFLGVYYHKNNKSWMESEFRVYSSANNCTFEYVSQPFLMDLEGKQGNFKNLREFVFKNIDGYFKIYSKHTPINLVRDLPQGFSALEPLVDLPIGINITRFQTLLALHRSYLTPGDSSSGWTAGAAAYYVGYLQPRTFLLKYNENGTITDAVDCALDPLSETKCTLKSFTVEKGIYQTSNFRVQPTESIVRFPNITNLCPFGEVFNATRFASVYAWNRKRISNCVADYSVLYNSASFSTFKCYGVSPTKLNDLCFTNVYADSFVIRGDEVRQIAPGQTGKIADYNYKLPDDFTGCVIAWNSNNLDSKVGGNYNYLYRLFRKSNLKPFERDISTEIYQAGSTPCNGVEGFNCYFPLQSYGFQPTNGVGYQPYRVVVLSFELLHAPATVCGPKKSTNLVKNKCVNFNFNGLTGTGVLTESNKKFLPFQQFGRDIADTTDAVRDPQTLEILDITPCSFGGVSVITPGTNTSNQVAVLYQDVNCTEVPVAIHADQLTPTWRVYSTGSNVFQTRAGCLIGAEHVNNSYECDIPIGAGICASYQTQTNSPRRARSVASQSIGGGSGSLGAENSVAYSNNSIAIPTNFTISVTTEILPVSMTKTSVDCTMYICGDSTECSNLLLQYGSFCTQLNRALTGIAVEQDKNTQEVFAQVKQIYKTPPIKDFGGFNFSQILPDPSGGGSGSFIEDLLFNKVTLADAGFIKQYGDCLGDIAARDLICAQKFNGLTVLPPLLTDEMIAQYTSALLAGTITSGWTFGAGAALQIPFAMQMAYRFNGIGVTQNVLYENQKLIANQFNSAIGKIQDSLSSTASALGKLQDVVNQNAQALNTLVKQLSSNFGAISSVLNDILSRLDKVEAEVQIDRLITGRLQSLQTYVTQQLIRAAEIRASANLAATKMSECVLGQSKRVDFCGKGYHLMSFPQSAPHGVVFLHVTYVPAQEKNFTTAPAICHDGKAHFPREGVFVSNGTHWFVTQRNFYEPQIITTDNTFVSGNCDVVIGIVNNTVYDPLQPELDSFKEELDKYFKNHTSPDVDLGDISGINASVVNIQKEIDRLNEVAKNLNESLIDLQELGKYEQYIKLEVLFQGPGSHHHHHH

SEQ ID NO: 137 - protein, 1236 aa, Artificial Sequence
  Description of Artificial Sequence: Synthetic polypeptide
MFLLTTKRTMFVFLVLLPLVSSQCVNLTTRTQLPPAYTNSFTRGVYYPDKVFRSSVLHSTQDLFLPFFSNVTWFHAIHVSGTNGTKRFDNPVLPFNDGVYFASTEKSNIIRGWIFGTTLDSKTQSLLIVNNATNVVIKVCEFQFCNDPFLGVYYHKNNKSWMESEFRVYSSANNCTFEYVSQPFLMDLEGKQGNFKNLREFVFKNIDGYFKIYSKHTPINLVRDLPQGFSALEPLVDLPIGINITRFQTLLALHRSYLTPGDSSSGWTAGAAAYYVGYLQPRTFLLKYNENGTITDAVDCALDPLSETKCTLKSFTVEKGIYQTSNFRVQPTESIVRFPNITNLCPFGEVFNATRFASVYAWNRKRISNCVADYSVLYNSASFSTFKCYGVSPTKLNDLCFTNVYADSFVIRGDEVRQIAPGQTGKIADYNYKLPDDFTGCVIAWNSNNLDSKVGGNYNYLYRLFRKSNLKPFERDISTEIYQAGSTPCNGVEGFNCYFPLQSYGFQPTNGVGYQPYRVVVLSFELLHAPATVCGPKKSTNLVKNKCVNFNFNGLTGTGVLTESNKKFLPFQQFGRDIADTTDAVRDPQTLEILDITPCSFGGVSVITPGTNTSNQVAVLYQDVNCTEVPVAIHADQLTPTWRVYSTGSNVFQTRAGCLIGAEHVNNSYECDIPIGAGICASYQTQTNSPRRARSVASQSIGGGSGSLGAENSVAYSNNSIAIPTNFTISVTTEILPVSMTKTSVDCTMYICGDSTECSNLLLQYGSFCTQLNRALTGIAVEQDKNTQEVFAQVKQIYKTPPIKDFGGFNFSQILPDPSGGGSGSFIEDLLFNKVTLADAGFIKQYGDCLGDIAARDLICAQKFNGLTVLPPLLTDEMIAQYTSALLAGTITSGWTFGAGAALQIPFAMQMAYRFNGIGVTQNVLYENQKLIANQFNSAIGKIQDSLSSTASALGKLQDVVNQNAQALNTLVKQLSSNFGAISSVLNDILSRLDKVEAEVQIDRLITGRLQSLQTYVTQQLIRAAEIRASANLAATKMSECVLGQSKRVDFCGKGYHLMSFPQSAPHGVVFLHVTYVPAQEKNFTTAPAICHDGKAHFPREGVFVSNGTHWFVTQRNFYEPQIITTDNTFVSGNCDVVIGIVNNTVYDPLQPELDSFKEELDKYFKNHTSPDVDLGDISGINASVVNIQKEIDRLNEVAKNLNESLIDLQELGKYEQYIKLEVLFQGPGSHHHHHH

SEQ ID NO: 138 - protein, 1282 aa, Artificial Sequence
  Description of Artificial Sequence: Synthetic polypeptide
MFLLTTKRTMFVFLVLLPLVSSQCVNLTTRTQLPPAYTNSFTRGVYYPDKVFRSSVLHSTQDLFLPFFSNVTWFHAIHVSGTNGTKRFDNPVLPFNDGVYFASTEKSNIIRGWIFGTTLDSKTQSLLIVNNATNVVIKVCEFQFCNDPFLGVYYHKNNKSWMESEFRVYSSANNCTFEYVSQPFLMDLEGKQGNFKNLREFVFKNIDGYFKIYSKHTPINLVRDLPQGFSALEPLVDLPIGINITRFQTLLALHRSYLTPGDSSSGWTAGAAAYYVGYLQPRTFLLKYNENGTITDAVDCALDPLSETKCTLKSFTVEKGIYQTSNFRVQPTESIVRFPNITNLCPFGEVFNATRFASVYAWNRKRISNCVADYSVLYNSASFSTFKCYGVSPTKLNDLCFTNVYADSFVIRGDEVRQIAPGQTGKIADYNYKLPDDFTGCVIAWNSNNLDSKVGGNYNYLYRLFRKSNLKPFERDISTEIYQAGSTPCNGVEGFNCYFPLQSYGFQPTNGVGYQPYRVVVLSFELLHAPATVCGPKKSTNLVKNKCVNFNFNGLTGTGVLTESNKKFLPFQQFGRDIADTTDAVRDPQTLEILDITPCSFGGVSVITPGTNTSNQVAVLYQDVNCTEVPVAIHADQLTPTWRVYSTGSNVFQTRAGCLIGAEHVNNSYECDIPIGAGICASYQTQTNSPRRARSVASQSIIAYTMSLGAENSVAYSNNSIAIPTNFTISVTTEILPVSMTKTSVDCTMYICGDSTECSNLLLQYGSFCTQLNRALTGIAVEQDKNTQEVFAQVKQIYKTPPIKDFGGFNFSQILPDPSKPSKRSFIEDLLFNKVTLADAGFIKQYGDCLGDIAARDLICAQKFNGLTVLPPLLTDEMIAQYTSALLAGTITSGWTFGAGAALQIPFAMQMAYRFNGIGVTQNVLYENQKLIANQFNSAIGKIQDSLSSTASALGKLQDVVNQNAQALNTLVKQLSSNFGAISSVLNDILSRLDKVEAEVQIDRLITGRLQSLQTYVTQQLIRAAEIRASANLAATKMSECVLGQSKRVDFCGKGYHLMSFPQSAPHGVVFLHVTYVPAQEKNFTTAPAICHDGKAHFPREGVFVSNGTHWFVTQRNFYEPQIITTDNTFVSGNCDVVIGIVNNTVYDPLQPELDSFKEELDKYFKNHTSPDVDLGDISGINASVVNIQKEIDRLNEVAKNLNESLIDLQELGKYEQYIKWPWYIWLGFIAGLIAIVMVTIMLCCMTSCCSCLKGCCSCGSCCKFDEDDSEPVLKGVKLHYT

SEQ ID NO: 139 - protein, 1290 aa, Artificial Sequence
  Description of Artificial Sequence: Synthetic polypeptide
MDSKGSSQKGSRLLLLLVVSNLLLPQGVLAQCVNLTTRTQLPPAYTNSFTRGVYYPDKVFRSSVLHSTQDLFLPFFSNVTWFHAIHVSGTNGTKRFDNPVLPFNDGVYFASTEKSNIIRGWIFGTTLDSKTQSLLIVNNATNVVIKVCEFQFCNDPFLGVYYHKNNKSWMESEFRVYSSANNCTFEYVSQPFLMDLEGKQGNFKNLREFVFKNIDGYFKIYSKHTPINLVRDLPQGFSALEPLVDLPIGINITRFQTLLALHRSYLTPGDSSSGWTAGAAAYYVGYLQPRTFLLKYNENGTITDAVDCALDPLSETKCTLKSFTVEKGIYQTSNFRVQPTESIVRFPNITNLCPFGEVFNATRFASVYAWNRKRISNCVADYSVLYNSASFSTFKCYGVSPTKLNDLCFTNVYADSFVIRGDEVRQIAPGQTGKIADYNYKLPDDFTGCVIAWNSNNLDSKVGGNYNYLYRLFRKSNLKPFERDISTEIYQAGSTPCNGVEGFNCYFPLQSYGFQPTNGVGYQPYRVVVLSFELLHAPATVCGPKKSTNLVKNKCVNFNFNGLTGTGVLTESNKKFLPFQQFGRDIADTTDAVRDPQTLEILDITPCSFGGVSVITPGTNTSNQVAVLYQDVNCTEVPVAIHADQLTPTWRVYSTGSNVFQTRAGCLIGAEHVNNSYECDIPIGAGICASYQTQTNSPRRARSVASQSIIAYTMSLGAENSVAYSNNSIAIPTNFTISVTTEILPVSMTKTSVDCTMYICGDSTECSNLLLQYGSFCTQLNRALTGIAVEQDKNTQEVFAQVKQIYKTPPIKDFGGFNFSQILPDPSKPSKRSFIEDLLFNKVTLADAGFIKQYGDCLGDIAARDLICAQKFNGLTVLPPLLTDEMIAQYTSALLAGTITSGWTFGAGAALQIPFAMQMAYRFNGIGVTQNVLYENQKLIANQFNSAIGKIQDSLSSTASALGKLQDVVNQNAQALNTLVKQLSSNFGAISSVLNDILSRLDKVEAEVQIDRLITGRLQSLQTYVTQQLIRAAEIRASANLAATKMSECVLGQSKRVDFCGKGYHLMSFPQSAPHGVVFLHVTYVPAQEKNFTTAPAICHDGKAHFPREGVFVSNGTHWFVTQRNFYEPQIITTDNTFVSGNCDVVIGIVNNTVYDPLQPELDSFKEELDKYFKNHTSPDVDLGDISGINASVVNIQKEIDRLNEVAKNLNESLIDLQELGKYEQYIKWPWYIWLGFIAGLIAIVMVTIMLCCMTSCCSCLKGCCSCGSCCKFDEDDSEPVLKGVKLHYT

SEQ ID NO: 140 - protein, 1282 aa, Artificial Sequence
  Description of Artificial Sequence: Synthetic polypeptide
MFLLTTKRTMFVFLVLLPLVSSQCVNLTTRTQLPPAYTNSFTRGVYYPDKVFRSSVLHSTQDLFLPFFSNVTWFHAIHVSGTNGTKRFDNPVLPFNDGVYFASTEKSNIIRGWIFGTTLDSKTQSLLIVNNATNVVIKVCEFQFCNDPFLGVYYHKNNKSWMESEFRVYSSANNCTFEYVSQPFLMDLEGKQGNFKNLREFVFKNIDGYFKIYSKHTPINLVRDLPQGFSALEPLVDLPIGINITRFQTLLALHRSYLTPGDSSSGWTAGAAAYYVGYLQPRTFLLKYNENGTITDAVDCALDPLSETKCTLKSFTVEKGIYQTSNFRVQPTESIVRFPNITNLCPFGEVFNATRFASVYAWNRKRISNCVADYSVLYNSASFSTFKCYGVSPTKLNDLCFTNVYADSFVIRGDEVRQIAPGQTGKIADYNYKLPDDFTGCVIAWNSNNLDSKVGGNYNYLYRLFRKSNLKPFERDISTEIYQAGSTPCNGVEGFNCYFPLQSYGFQPTNGVGYQPYRVVVLSFELLHAPATVCGPKKSTNLVKNKCVNFNFNGLTGTGVLTESNKKFLPFQQFGRDIADTTDAVRDPQTLEILDITPCSFGGVSVITPGTNTSNQVAVLYQDVNCTEVPVAIHADQLTPTWRVYSTGSNVFQTRAGCLIGAEHVNNSYECDIPIGAGICASYQTQTNSPRRARSVASQSIGGGSGSLGAENSVAYSNNSIAIPTNFTISVTTEILPVSMTKTSVDCTMYICGDSTECSNLLLQYGSFCTQLNRALTGIAVEQDKNTQEVFAQVKQIYKTPPIKDFGGFNFSQILPDPSGGGSGSFIEDLLFNKVTLADAGFIKQYGDCLGDIAARDLICAQKFNGLTVLPPLLTDEMIAQYTSALLAGTITSGWTFGAGAALQIPFAMQMAYRFNGIGVTQNVLYENQKLIANQFNSAIGKIQDSLSSTASALGKLQDVVNQNAQALNTLVKQLSSNFGAISSVLNDILSRLDKVEAEVQIDRLITGRLQSLQTYVTQQLIRAAEIRASANLAATKMSECVLGQSKRVDFCGKGYHLMSFPQSAPHGVVFLHVTYVPAQEKNFTTAPAICHDGKAHFPREGVFVSNGTHWFVTQRNFYEPQIITTDNTFVSGNCDVVIGIVNNTVYDPLQPELDSFKEELDKYFKNHTSPDVDLGDISGINASVVNIQKEIDRLNEVAKNLNESLIDLQELGKYEQYIKWPWYIWLGFIAGLIAIVMVTIMLCCMTSCCSCLKGCCSCGSCCKFDEDDSEPVLKGVKLHYT

SEQ ID NO: 141 - protein, 1290 aa, Artificial Sequence
  Description of Artificial Sequence: Synthetic polypeptide
MDSKGSSQKGSRLLLLLVVSNLLLPQGVLAQCVNLTTRTQLPPAYTNSFTRGVYYPDKVFRSSVLHSTQDLFLPFFSNVTWFHAIHVSGTNGTKRFDNPVLPFNDGVYFASTEKSNIIRGWIFGTTLDSKTQSLLIVNNATNVVIKVCEFQFCNDPFLGVYYHKNNKSWMESEFRVYSSANNCTFEYVSQPFLMDLEGKQGNFKNLREFVFKNIDGYFKIYSKHTPINLVRDLPQGFSALEPLVDLPIGINITRFQTLLALHRSYLTPGDSSSGWTAGAAAYYVGYLQPRTFLLKYNENGTITDAVDCALDPLSETKCTLKSFTVEKGIYQTSNFRVQPTESIVRFPNITNLCPFGEVFNATRFASVYAWNRKRISNCVADYSVLYNSASFSTFKCYGVSPTKLNDLCFTNVYADSFVIRGDEVRQIAPGQTGKIADYNYKLPDDFTGCVIAWNSNNLDSKVGGNYNYLYRLFRKSNLKPFERDISTEIYQAGSTPCNGVEGFNCYFPLQSYGFQPTNGVGYQPYRVVVLSFELLHAPATVCGPKKSTNLVKNKCVNFNFNGLTGTGVLTESNKKFLPFQQFGRDIADTTDAVRDPQTLEILDITPCSFGGVSVITPGTNTSNQVAVLYQDVNCTEVPVAIHADQLTPTWRVYSTGSNVFQTRAGCLIGAEHVNNSYECDIPIGAGICASYQTQTNSPRRARSVASQSIGGGSGSLGAENSVAYSNNSIAIPTNFTISVTTEILPVSMTKTSVDCTMYICGDSTECSNLLLQYGSFCTQLNRALTGIAVEQDKNTQEVFAQVKQIYKTPPIKDFGGFNFSQILPDPSGGGSGSFIEDLLFNKVTLADAGFIKQYGDCLGDIAARDLICAQKFNGLTVLPPLLTDEMIAQYTSALLAGTITSGWTFGAGAALQIPFAMQMAYRFNGIGVTQNVLYENQKLIANQFNSAIGKIQDSLSSTASALGKLQDVVNQNAQALNTLVKQLSSNFGAISSVLNDILSRLDKVEAEVQIDRLITGRLQSLQTYVTQQLIRAAEIRASANLAATKMSECVLGQSKRVDFCGKGYHLMSFPQSAPHGVVFLHVTYVPAQEKNFTTAPAICHDGKAHFPREGVFVSNGTHWFVTQRNFYEPQIITTDNTFVSGNCDVVIGIVNNTVYDPLQPELDSFKEELDKYFKNHTSPDVDLGDISGINASVVNIQKEIDRLNEVAKNLNESLIDLQELGKYEQYIKWPWYIWLGFIAGLIAIVMVTIMLCCMTSCCSCLKGCCSCGSCCKFDEDDSEPVLKGVKLHYT

SEQ ID NO: 142 - protein, 1271 aa, Artificial Sequence
  Description of Artificial Sequence: Synthetic polypeptide
MDSKGSSQKGSRLLLLLVVSNLLLPQGVLAQCVNLTTRTQLPPAYTNSFTRGVYYPDKVFRSSVLHSTQDLFLPFFSNVTWFHAIHVSGTNGTKRFDNPVLPFNDGVYFASTEKSNIIRGWIFGTTLDSKTQSLLIVNNATNVVIKVCEFQFCNDPFLGVYYHKNNKSWMESEFRVYSSANNCTFEYVSQPFLMDLEGKQGNFKNLREFVFKNIDGYFKIYSKHTPINLVRDLPQGFSALEPLVDLPIGINITRFQTLLALHRSYLTPGDSSSGWTAGAAAYYVGYLQPRTFLLKYNENGTITDAVDCALDPLSETKCTLKSFTVEKGIYQTSNFRVQPTESIVRFPNITNLCPFGEVFNATRFASVYAWNRKRISNCVADYSVLYNSASFSTFKCYGVSPTKLNDLCFTNVYADSFVIRGDEVRQIAPGQTGKIADYNYKLPDDFTGCVIAWNSNNLDSKVGGNYNYLYRLFRKSNLKPFERDISTEIYQAGSTPCNGVEGFNCYFPLQSYGFQPTNGVGYQPYRVVVLSFELLHAPATVCGPKKSTNLVKNKCVNFNFNGLTGTGVLTESNKKFLPFQQFGRDIADTTDAVRDPQTLEILDITPCSFGGVSVITPGTNTSNQVAVLYQDVNCTEVPVAIHADQLTPTWRVYSTGSNVFQTRAGCLIGAEHVNNSYECDIPIGAGICASYQTQTNSPRRARSVASQSIIAYTMSLGAENSVAYSNNSIAIPTNFTISVTTEILPVSMTKTSVDCTMYICGDSTECSNLLLQYGSFCTQLNRALTGIAVEQDKNTQEVFAQVKQIYKTPPIKDFGGFNFSQILPDPSKPSKRSFIEDLLFNKVTLADAGFIKQYGDCLGDIAARDLICAQKFNGLTVLPPLLTDEMIAQYTSALLAGTITSGWTFGAGAALQIPFAMQMAYRFNGIGVTQNVLYENQKLIANQFNSAIGKIQDSLSSTASALGKLQDVVNQNAQALNTLVKQLSSNFGAISSVLNDILSRLDKVEAEVQIDRLITGRLQSLQTYVTQQLIRAAEIRASANLAATKMSECVLGQSKRVDFCGKGYHLMSFPQSAPHGVVFLHVTYVPAQEKNFTTAPAICHDGKAHFPREGVFVSNGTHWFVTQRNFYEPQIITTDNTFVSGNCDVVIGIVNNTVYDPLQPELDSFKEELDKYFKNHTSPDVDLGDISGINASVVNIQKEIDRLNEVAKNLNESLIDLQELGKYEQYIKGYIPEAPRDGQAYVRKDGEWVLLSTFLLEVLFQGPGSHHHHHH

SEQ ID NO: 143 - protein, 1263 aa, Artificial Sequence
  Description of Artificial Sequence: Synthetic polypeptide
MFLLTTKRTMFVFLVLLPLVSSQCVNLTTRTQLPPAYTNSFTRGVYYPDKVFRSSVLHSTQDLFLPFFSNVTWFHAIHVSGTNGTKRFDNPVLPFNDGVYFASTEKSNIIRGWIFGTTLDSKTQSLLIVNNATNVVIKVCEFQFCNDPFLGVYYHKNNKSWMESEFRVYSSANNCTFEYVSQPFLMDLEGKQGNFKNLREFVFKNIDGYFKIYSKHTPINLVRDLPQGFSALEPLVDLPIGINITRFQTLLALHRSYLTPGDSSSGWTAGAAAYYVGYLQPRTFLLKYNENGTITDAVDCALDPLSETKCTLKSFTVEKGIYQTSNFRVQPTESIVRFPNITNLCPFGEVFNATRFASVYAWNRKRISNCVADYSVLYNSASFSTFKCYGVSPTKLNDLCFTNVYADSFVIRGDEVRQIAPGQTGKIADYNYKLPDDFTGCVIAWNSNNLDSKVGGNYNYLYRLFRKSNLKPFERDISTEIYQAGSTPCNGVEGFNCYFPLQSYGFQPTNGVGYQPYRVVVLSFELLHAPATVCGPKKSTNLVKNKCVNFNFNGLTGTGVLTESNKKFLPFQQFGRDIADTTDAVRDPQTLEILDITPCSFGGVSVITPGTNTSNQVAVLYQDVNCTEVPVAIHADQLTPTWRVYSTGSNVFQTRAGCLIGAEHVNNSYECDIPIGAGICASYQTQTNSPRRARSVASQSIIAYTMSLGAENSVAYSNNSIAIPTNFTISVTTEILPVSMTKTSVDCTMYICGDSTECSNLLLQYGSFCTQLNRALTGIAVEQDKNTQEVFAQVKQIYKTPPIKDFGGFNFSQILPDPSKPSKRSFIEDLLFNKVTLADAGFIKQYGDCLGDIAARDLICAQKFNGLTVLPPLLTDEMIAQYTSALLAGTITSGWTFGAGAALQIPFAMQMAYRFNGIGVTQNVLYENQKLIANQFNSAIGKIQDSLSSTASALGKLQDVVNQNAQALNTLVKQLSSNFGAISSVLNDILSRLDKVEAEVQIDRLITGRLQSLQTYVTQQLIRAAEIRASANLAATKMSECVLGQSKRVDFCGKGYHLMSFPQSAPHGVVFLHVTYVPAQEKNFTTAPAICHDGKAHFPREGVFVSNGTHWFVTQRNFYEPQIITTDNTFVSGNCDVVIGIVNNTVYDPLQPELDSFKEELDKYFKNHTSPDVDLGDISGINASVVNIQKEIDRLNEVAKNLNESLIDLQELGKYEQYIKGYIPEAPRDGQAYVRKDGEWVLLSTFLLEVLFQGPGSHHHHHH

SEQ ID NO: 144 - protein, 1271 aa, Artificial Sequence
  Description of Artificial Sequence: Synthetic polypeptide
MDSKGSSQKGSRLLLLLVVSNLLLPQGVLAQCVNLTTRTQLPPAYTNSFTRGVYYPDKVFRSSVLHSTQDLFLPFFSNVTWFHAIHVSGTNGTKRFDNPVLPFNDGVYFASTEKSNIIRGWIFGTTLDSKTQSLLIVNNATNVVIKVCEFQFCNDPFLGVYYHKNNKSWMESEFRVYSSANNCTFEYVSQPFLMDLEGKQGNFKNLREFVFKNIDGYFKIYSKHTPINLVRDLPQGFSALEPLVDLPIGINITRFQTLLALHRSYLTPGDSSSGWTAGAAAYYVGYLQPRTFLLKYNENGTITDAVDCALDPLSETKCTLKSFTVEKGIYQTSNFRVQPTESIVRFPNITNLCPFGEVFNATRFASVYAWNRKRISNCVADYSVLYNSASFSTFKCYGVSPTKLNDLCFTNVYADSFVIRGDEVRQIAPGQTGKIADYNYKLPDDFTGCVIAWNSNNLDSKVGGNYNYLYRLFRKSNLKPFERDISTEIYQAGSTPCNGVEGFNCYFPLQSYGFQPTNGVGYQPYRVVVLSFELLHAPATVCGPKKSTNLVKNKCVNFNFNGLTGTGVLTESNKKFLPFQQFGRDIADTTDAVRDPQTLEILDITPCSFGGVSVITPGTNTSNQVAVLYQDVNCTEVPVAIHADQLTPTWRVYSTGSNVFQTRAGCLIGAEHVNNSYECDIPIGAGICASYQTQTNSPRRARSVASQSIGGGSGSLGAENSVAYSNNSIAIPTNFTISVTTEILPVSMTKTSVDCTMYICGDSTECSNLLLQYGSFCTQLNRALTGIAVEQDKNTQEVFAQVKQIYKTPPIKDFGGFNFSQILPDPSGGGSGSFIEDLLFNKVTLADAGFIKQYGDCLGDIAARDLICAQKFNGLTVLPPLLTDEMIAQYTSALLAGTITSGWTFGAGAALQIPFAMQMAYRFNGIGVTQNVLYENQKLIANQFNSAIGKIQDSLSSTASALGKLQDVVNQNAQALNTLVKQLSSNFGAISSVLNDILSRLDKVEAEVQIDRLITGRLQSLQTYVTQQLIRAAEIRASANLAATKMSECVLGQSKRVDFCGKGYHLMSFPQSAPHGVVFLHVTYVPAQEKNFTTAPAICHDGKAHFPREGVFVSNGTHWFVTQRNFYEPQIITTDNTFVSGNCDVVIGIVNNTVYDPLQPELDSFKEELDKYFKNHTSPDVDLGDISGINASVVNIQKEIDRLNEVAKNLNESLIDLQELGKYEQYIKGYIPEAPRDGQAYVRKDGEWVLLSTFLLEVLFQGPGSHHHHHH

SEQ ID NO: 145 - protein, 1263 aa, Artificial Sequence
  Description of Artificial Sequence: Synthetic polypeptide
MFLLTTKRTMFVFLVLLPLVSSQCVNLTTRTQLPPAYTNSFTRGVYYPDKVFRSSVLHSTQDLFLPFFSNVTWFHAIHVSGTNGTKRFDNPVLPFNDGVYFASTEKSNIIRGWIFGTTLDSKTQSLLIVNNATNVVIKVCEFQFCNDPFLGVYYHKNNKSWMESEFRVYSSANNCTFEYVSQPFLMDLEGKQGNFKNLREFVFKNIDGYFKIYSKHTPINLVRDLPQGFSALEPLVDLPIGINITRFQTLLALHRSYLTPGDSSSGWTAGAAAYYVGYLQPRTFLLKYNENGTITDAVDCALDPLSETKCTLKSFTVEKGIYQTSNFRVQPTESIVRFPNITNLCPFGEVFNATRFASVYAWNRKRISNCVADYSVLYNSASFSTFKCYGVSPTKLNDLCFTNVYADSFVIRGDEVRQIAPGQTGKIADYNYKLPDDFTGCVIAWNSNNLDSKVGGNYNYLYRLFRKSNLKPFERDISTEIYQAGSTPCNGVEGFNCYFPLQSYGFQPTNGVGYQPYRVVVLSFELLHAPATVCGPKKSTNLVKNKCVNFNFNGLTGTGVLTESNKKFLPFQQFGRDIADTTDAVRDPQTLEILDITPCSFGGVSVITPGTNTSNQVAVLYQDVNCTEVPVAIHADQLTPTWRVYSTGSNVFQTRAGCLIGAEHVNNSYECDIPIGAGICASYQTQTNSPRRARSVASQSIGGGSGSLGAENSVAYSNNSIAIPTNFTISVTTEILPVSMTKTSVDCTMYICGDSTECSNLLLQYGSFCTQLNRALTGIAVEQDKNTQEVFAQVKQIYKTPPIKDFGGFNFSQILPDPSGGGSGSFIEDLLFNKVTLADAGFIKQYGDCLGDIAARDLICAQKFNGLTVLPPLLTDEMIAQYTSALLAGTITSGWTFGAGAALQIPFAMQMAYRFNGIGVTQNVLYENQKLIANQFNSAIGKIQDSLSSTASALGKLQDVVNQNAQALNTLVKQLSSNFGAISSVLNDILSRLDKVEAEVQIDRLITGRLQSLQTYVTQQLIRAAEIRASANLAATKMSECVLGQSKRVDFCGKGYHLMSFPQSAPHGVVFLHVTYVPAQEKNFTTAPAICHDGKAHFPREGVFVSNGTHWFVTQRNFYEPQIITTDNTFVSGNCDVVIGIVNNTVYDPLQPELDSFKEELDKYFKNHTSPDVDLGDISGINASVVNIQKEIDRLNEVAKNLNESLIDLQELGKYEQYIKGYIPEAPRDGQAYVRKDGEWVLLSTFLLEVLFQGPGSHHHHHH

SEQ ID NO: 146 - protein, 1244 aa, Artificial Sequence
  Description of Artificial Sequence: Synthetic polypeptide
MDSKGSSQKGSRLLLLLVVSNLLLPQGVLAQCVNLTTRTQLPPAYTNSFTRGVYYPDKVFRSSVLHSTQDLFLPFFSNVTWFHAIHVSGTNGTKRFDNPVLPFNDGVYFASTEKSNIIRGWIFGTTLDSKTQSLLIVNNATNVVIKVCEFQFCNDPFLGVYYHKNNKSWMESEFRVYSSANNCTFEYVSQPFLMDLEGKQGNFKNLREFVFKNIDGYFKIYSKHTPINLVRDLPQGFSALEPLVDLPIGINITRFQTLLALHRSYLTPGDSSSGWTAGAAAYYVGYLQPRTFLLKYNENGTITDAVDCALDPLSETKCTLKSFTVEKGIYQTSNFRVQPTESIVRFPNITNLCPFGEVFNATRFASVYAWNRKRISNCVADYSVLYNSASFSTFKCYGVSPTKLNDLCFTNVYADSFVIRGDEVRQIAPGQTGKIADYNYKLPDDFTGCVIAWNSNNLDSKVGGNYNYLYRLFRKSNLKPFERDISTEIYQAGSTPCNGVEGFNCYFPLQSYGFQPTNGVGYQPYRVVVLSFELLHAPATVCGPKKSTNLVKNKCVNFNFNGLTGTGVLTESNKKFLPFQQFGRDIADTTDAVRDPQTLEILDITPCSFGGVSVITPGTNTSNQVAVLYQDVNCTEVPVAIHADQLTPTWRVYSTGSNVFQTRAGCLIGAEHVNNSYECDIPIGAGICASYQTQTNSPRRARSVASQSIIAYTMSLGAENSVAYSNNSIAIPTNFTISVTTEILPVSMTKTSVDCTMYICGDSTECSNLLLQYGSFCTQLNRALTGIAVEQDKNTQEVFAQVKQIYKTPPIKDFGGFNFSQILPDPSKPSKRSFIEDLLFNKVTLADAGFIKQYGDCLGDIAARDLICAQKFNGLTVLPPLLTDEMIAQYTSALLAGTITSGWTFGAGAALQIPFAMQMAYRFNGIGVTQNVLYENQKLIANQFNSAIGKIQDSLSSTASALGKLQDVVNQNAQALNTLVKQLSSNFGAISSVLNDILSRLDPPEAEVQIDRLITGRLQSLQTYVTQQLIRAAEIRASANLAATKMSECVLGQSKRVDFCGKGYHLMSFPQSAPHGVVFLHVTYVPAQEKNFTTAPAICHDGKAHFPREGVFVSNGTHWFVTQRNFYEPQIITTDNTFVSGNCDVVIGIVNNTVYDPLQPELDSFKEELDKYFKNHTSPDVDLGDISGINASVVNIQKEIDRLNEVAKNLNESLIDLQELGKYEQYIKLEVLFQGPGSHHHHHH

SEQ ID NO: 147 - protein, 1236 aa, Artificial Sequence
  Description of Artificial Sequence: Synthetic polypeptide
MFLLTTKRTMFVFLVLLPLVSSQCVNLTTRTQLPPAYTNSFTRGVYYPDKVFRSSVLHSTQDLFLPFFSNVTWFHAIHVSGTNGTKRFDNPVLPFNDGVYFASTEKSNIIRGWIFGTTLDSKTQSLLIVNNATNVVIKVCEFQFCNDPFLGVYYHKNNKSWMESEFRVYSSANNCTFEYVSQPFLMDLEGKQGNFKNLREFVFKNIDGYFKIYSKHTPINLVRDLPQGFSALEPLVDLPIGINITRFQTLLALHRSYLTPGDSSSGWTAGAAAYYVGYLQPRTFLLKYNENGTITDAVDCALDPLSETKCTLKSFTVEKGIYQTSNFRVQPTESIVRFPNITNLCPFGEVFNATRFASVYAWNRKRISNCVADYSVLYNSASFSTFKCYGVSPTKLNDLCFTNVYADSFVIRGDEVRQIAPGQTGKIADYNYKLPDDFTGCVIAWNSNNLDSKVGGNYNYLYRLFRKSNLKPFERDISTEIYQAGSTPCNGVEGFNCYFPLQSYGFQPTNGVGYQPYRVVVLSFELLHAPATVCGPKKSTNLVKNKCVNFNFNGLTGTGVLTESNKKFLPFQQFGRDIADTTDAVRDPQTLEILDITPCSFGGVSVITPGTNTSNQVAVLYQDVNCTEVPVAIHADQLTPTWRVYSTGSNVFQTRAGCLIGAEHVNNSYECDIPIGAGICASYQTQTNSPRRARSVASQSIIAYTMSLGAENSVAYSNNSIAIPTNFTISVTTEILPVSMTKTSVDCTMYICGDSTECSNLLLQYGSFCTQLNRALTGIAVEQDKNTQEVFAQVKQIYKTPPIKDFGGFNFSQILPDPSKPSKRSFIEDLLFNKVTLADAGFIKQYGDCLGDIAARDLICAQKFNGLTVLPPLLTDEMIAQYTSALLAGTITSGWTFGAGAALQIPFAMQMAYRFNGIGVTQNVLYENQKLIANQFNSAIGKIQDSLSSTASALGKLQDVVNQNAQALNTLVKQLSSNFGAISSVLNDILSRLDPPEAEVQIDRLITGRLQSLQTYVTQQLIRAAEIRASANLAATKMSECVLGQSKRVDFCGKGYHLMSFPQSAPHGVVFLHVTYVPAQEKNFTTAPAICHDGKAHFPREGVFVSNGTHWFVTQRNFYEPQIITTDNTFVSGNCDVVIGIVNNTVYDPLQPELDSFKEELDKYFKNHTSPDVDLGDISGINASVVNIQKEIDRLNEVAKNLNESLIDLQELGKYEQYIKLEVLFQGPGSHHHHHH

SEQ ID NO: 148 - protein, 1244 aa, Artificial Sequence
  Description of Artificial Sequence: Synthetic polypeptide
MDSKGSSQKGSRLLLLLVVSNLLLPQGVLAQCVNLTTRTQLPPAYTNSFTRGVYYPDKVFRSSVLHSTQDLFLPFFSNVTWFHAIHVSGTNGTKRFDNPVLPFNDGVYFASTEKSNIIRGWIFGTTLDSKTQSLLIVNNATNVVIKVCEFQFCNDPFLGVYYHKNNKSWMESEFRVYSSANNCTFEYVSQPFLMDLEGKQGNFKNLREFVFKNIDGYFKIYSKHTPINLVRDLPQGFSALEPLVDLPIGINITRFQTLLALHRSYLTPGDSSSGWTAGAAAYYVGYLQPRTFLLKYNENGTITDAVDCALDPLSETKCTLKSFTVEKGIYQTSNFRVQPTESIVRFPNITNLCPFGEVFNATRFASVYAWNRKRISNCVADYSVLYNSASFSTFKCYGVSPTKLNDLCFTNVYADSFVIRGDEVRQIAPGQTGKIADYNYKLPDDFTGCVIAWNSNNLDSKVGGNYNYLYRLFRKSNLKPFERDISTEIYQAGSTPCNGVEGFNCYFPLQSYGFQPTNGVGYQPYRVVVLSFELLHAPATVCGPKKSTNLVKNKCVNFNFNGLTGTGVLTESNKKFLPFQQFGRDIADTTDAVRDPQTLEILDITPCSFGGVSVITPGTNTSNQVAVLYQDVNCTEVPVAIHADQLTPTWRVYSTGSNVFQTRAGCLIGAEHVNNSYECDIPIGAGICASYQTQTNSPRRARSVASQSIGGGSGSLGAENSVAYSNNSIAIPTNFTISVTTEILPVSMTKTSVDCTMYICGDSTECSNLLLQYGSFCTQLNRALTGIAVEQDKNTQEVFAQVKQIYKTPPIKDFGGFNFSQILPDPSGGGSGSFIEDLLFNKVTLADAGFIKQYGDCLGDIAARDLICAQKFNGLTVLPPLLTDEMIAQYTSALLAGTITSGWTFGAGAALQIPFAMQMAYRFNGIGVTQNVLYENQKLIANQFNSAIGKIQDSLSSTASALGKLQDVVNQNAQALNTLVKQLSSNFGAISSVLNDILSRLDPPEAEVQIDRLITGRLQSLQTYVTQQLIRAAEIRASANLAATKMSECVLGQSKRVDFCGKGYHLMSFPQSAPHGVVFLHVTYVPAQEKNFTTAPAICHDGKAHFPREGVFVSNGTHWFVTQRNFYEPQIITTDNTFVSGNCDVVIGIVNNTVYDPLQPELDSFKEELDKYFKNHTSPDVDLGDISGINASVVNIQKEIDRLNEVAKNLNESLIDLQELGKYEQYIKLEVLFQGPGSHHHHHH

SEQ ID NO: 149 - protein, 1236 aa, Artificial Sequence
  Description of Artificial Sequence: Synthetic polypeptide
MFLLTTKRTMFVFLVLLPLVSSQCVNLTTRTQLPPAYTNSFTRGVYYPDKVFRSSVLHSTQDLFLPFFSNVTWFHAIHVSGTNGTKRFDNPVLPFNDGVYFASTEKSNIIRGWIFGTTLDSKTQSLLIVNNATNVVIKVCEFQFCNDPFLGVYYHKNNKSWMESEFRVYSSANNCTFEYVSQPFLMDLEGKQGNFKNLREFVFKNIDGYFKIYSKHTPINLVRDLPQGFSALEPLVDLPIGINITRFQTLLALHRSYLTPGDSSSGWTAGAAAYYVGYLQPRTFLLKYNENGTITDAVDCALDPLSETKCTLKSFTVEKGIYQTSNFRVQPTESIVRFPNITNLCPFGEVFNATRFASVYAWNRKRISNCVADYSVLYNSASFSTFKCYGVSPTKLNDLCFTNVYADSFVIRGDEVRQIAPGQTGKIADYNYKLPDDFTGCVIAWNSNNLDSKVGGNYNYLYRLFRKSNLKPFERDISTEIYQAGSTPCNGVEGFNCYFPLQSYGFQPTNGVGYQPYRVVVLSFELLHAPATVCGPKKSTNLVKNKCVNFNFNGLTGTGVLTESNKKFLPFQQFGRDIADTTDAVRDPQTLEILDITPCSFGGVSVITPGTNTSNQVAVLYQDVNCTEVPVAIHADQLTPTWRVYSTGSNVFQTRAGCLIGAEHVNNSYECDIPIGAGICASYQTQTNSPRRARSVASQSIGGGSGSLGAENSVAYSNNSIAIPTNFTISVTTEILPVSMTKTSVDCTMYICGDSTECSNLLLQYGSFCTQLNRALTGIAVEQDKNTQEVFAQVKQIYKTPPIKDFGGFNFSQILPDPSGGGSGSFIEDLLFNKVTLADAGFIKQYGDCLGDIAARDLICAQKFNGLTVLPPLLTDEMIAQYTSALLAGTITSGWTFGAGAALQIPFAMQMAYRFNGIGVTQNVLYENQKLIANQFNSAIGKIQDSLSSTASALGKLQDVVNQNAQALNTLVKQLSSNFGAISSVLNDILSRLDPPEAEVQIDRLITGRLQSLQTYVTQQLIRAAEIRASANLAATKMSECVLGQSKRVDFCGKGYHLMSFPQSAPHGVVFLHVTYVPAQEKNFTTAPAICHDGKAHFPREGVFVSNGTHWFVTQRNFYEPQIITTDNTFVSGNCDVVIGIVNNTVYDPLQPELDSFKEELDKYFKNHTSPDVDLGDISGINASVVNIQKEIDRLNEVAKNLNESLIDLQELGKYEQYIKLEVLFQGPGSHHHHHH

SEQ ID NO: 150 - protein, 1282 aa, Artificial Sequence
  Description of Artificial Sequence: Synthetic polypeptide
MFLLTTKRTMFVFLVLLPLVSSQCVNLTTRTQLPPAYTNSFTRGVYYPDKVFRSSVLHSTQDLFLPFFSNVTWFHAIHVSGTNGTKRFDNPVLPFNDGVYFASTEKSNIIRGWIFGTTLDSKTQSLLIVNNATNVVIKVCEFQFCNDPFLGVYYHKNNKSWMESEFRVYSSANNCTFEYVSQPFLMDLEGKQGNFKNLREFVFKNIDGYFKIYSKHTPINLVRDLPQGFSALEPLVDLPIGINITRFQTLLALHRSYLTPGDSSSGWTAGAAAYYVGYLQPRTFLLKYNENGTITDAVDCALDPLSETKCTLKSFTVEKGIYQTSNFRVQPTESIVRFPNITNLCPFGEVFNATRFASVYAWNRKRISNCVADYSVLYNSASFSTFKCYGVSPTKLNDLCFTNVYADSFVIRGDEVRQIAPGQTGKIADYNYKLPDDFTGCVIAWNSNNLDSKVGGNYNYLYRLFRKSNLKPFERDISTEIYQAGSTPCNGVEGFNCYFPLQSYGFQPTNGVGYQPYRVVVLSFELLHAPATVCGPKKSTNLVKNKCVNFNFNGLTGTGVLTESNKKFLPFQQFGRDIADTTDAVRDPQTLEILDITPCSFGGVSVITPGTNTSNQVAVLYQDVNCTEVPVAIHADQLTPTWRVYSTGSNVFQTRAGCLIGAEHVNNSYECDIPIGAGICASYQTQTNSPRRARSVASQSIIAYTMSLGAENSVAYSNNSIAIPTNFTISVTTEILPVSMTKTSVDCTMYICGDSTECSNLLLQYGSFCTQLNRALTGIAVEQDKNTQEVFAQVKQIYKTPPIKDFGGFNFSQILPDPSKPSKRSFIEDLLFNKVTLADAGFIKQYGDCLGDIAARDLICAQKFNGLTVLPPLLTDEMIAQYTSALLAGTITSGWTFGAGAALQIPFAMQMAYRFNGIGVTQNVLYENQKLIANQFNSAIGKIQDSLSSTASALGKLQDVVNQNAQALNTLVKQLSSNFGAISSVLNDILSRLDPPEAEVQIDRLITGRLQSLQTYVTQQLIRAAEIRASANLAATKMSECVLGQSKRVDFCGKGYHLMSFPQSAPHGVVFLHVTYVPAQEKNFTTAPAICHDGKAHFPREGVFVSNGTHWFVTQRNFYEPQIITTDNTFVSGNCDVVIGIVNNTVYDPLQPELDSFKEELDKYFKNHTSPDVDLGDISGINASVVNIQKEIDRLNEVAKNLNESLIDLQELGKYEQYIKWPWYIWLGFIAGLIAIVMVTIMLCCMTSCCSCLKGCCSCGSCCKFDEDDSEPVLKGVKLHYT

SEQ ID NO: 151 - protein, 1290 aa, Artificial Sequence
  Description of Artificial Sequence: Synthetic polypeptide
MDSKGSSQKGSRLLLLLVVSNLLLPQGVLAQCVNLTTRTQLPPAYTNSFTRGVYYPDKVFRSSVLHSTQDLFLPFFSNVTWFHAIHVSGTNGTKRFDNPVLPFNDGVYFASTEKSNIIRGWIFGTTLDSKTQSLLIVNNATNVVIKVCEFQFCNDPFLGVYYHKNNKSWMESEFRVYSSANNCTFEYVSQPFLMDLEGKQGNFKNLREFVFKNIDGYFKIYSKHTPINLVRDLPQGFSALEPLVDLPIGINITRFQTLLALHRSYLTPGDSSSGWTAGAAAYYVGYLQPRTFLLKYNENGTITDAVDCALDPLSETKCTLKSFTVEKGIYQTSNFRVQPTESIVRFPNITNLCPFGEVFNATRFASVYAWNRKRISNCVADYSVLYNSASFSTFKCYGVSPTKLNDLCFTNVYADSFVIRGDEVRQIAPGQTGKIADYNYKLPDDFTGCVIAWNSNNLDSKVGGNYNYLYRLFRKSNLKPFERDISTEIYQAGSTPCNGVEGFNCYFPLQSYGFQPTNGVGYQPYRVVVLSFELLHAPATVCGPKKSTNLVKNKCVNFNFNGLTGTGVLTESNKKFLPFQQFGRDIADTTDAVRDPQTLEILDITPCSFGGVSVITPGTNTSNQVAVLYQDVNCTEVPVAIHADQLTPTWRVYSTGSNVFQTRAGCLIGAEHVNNSYECDIPIGAGICASYQTQTNSPRRARSVASQSIIAYTMSLGAENSVAYSNNSIAIPTNFTISVTTEILPVSMTKTSVDCTMYICGDSTECSNLLLQYGSFCTQLNRALTGIAVEQDKNTQEVFAQVKQIYKTPPIKDFGGFNFSQILPDPSKPSKRSFIEDLLFNKVTLADAGFIKQYGDCLGDIAARDLICAQKFNGLTVLPPLLTDEMIAQYTSALLAGTITSGWTFGAGAALQIPFAMQMAYRFNGIGVTQNVLYENQKLIANQFNSAIGKIQDSLSSTASALGKLQDVVNQNAQALNTLVKQLSSNFGAISSVLNDILSRLDPPEAEVQIDRLITGRLQSLQTYVTQQLIRAAEIRASANLAATKMSECVLGQSKRVDFCGKGYHLMSFPQSAPHGVVFLHVTYVPAQEKNFTTAPAICHDGKAHFPREGVFVSNGTHWFVTQRNFYEPQIITTDNTFVSGNCDVVIGIVNNTVYDPLQPELDSFKEELDKYFKNHTSPDVDLGDISGINASVVNIQKEIDRLNEVAKNLNESLIDLQELGKYEQYIKWPWYIWLGFIAGLIAIVMVTIMLCCMTSCCSCLKGCCSCGSCCKFDEDDSEPVLKGVKLHYT

SEQ ID NO: 152 - protein, 1282 aa, Artificial Sequence
  Description of Artificial Sequence: Synthetic polypeptide
MFLLTTKRTMFVFLVLLPLVSSQCVNLTTRTQLPPAYTNSFTRGVYYPDKVFRSSVLHSTQDLFLPFFSNVTWFHAIHVSGTNGTKRFDNPVLPFNDGVYFASTEKSNIIRGWIFGTTLDSKTQSLLIVNNATNVVIKVCEFQFCNDPFLGVYYHKNNKSWMESEFRVYSSANNCTFEYVSQPFLMDLEGKQGNFKNLREFVFKNIDGYFKIYSKHTPINLVRDLPQGFSALEPLVDLPIGINITRFQTLLALHRSYLTPGDSSSGWTAGAAAYYVGYLQPRTFLLKYNENGTITDAVDCALDPLSETKCTLKSFTVEKGIYQTSNFRVQPTESIVRFPNITNLCPFGEVFNATRFASVYAWNRKRISNCVADYSVLYNSASFSTFKCYGVSPTKLNDLCFTNVYADSFVIRGDEVRQIAPGQTGKIADYNYKLPDDFTGCVIAWNSNNLDSKVGGNYNYLYRLFRKSNLKPFERDISTEIYQAGSTPCNGVEGFNCYFPLQSYGFQPTNGVGYQPYRVVVLSFELLHAPATVCGPKKSTNLVKNKCVNFNFNGLTGTGVLTESNKKFLPFQQFGRDIADTTDAVRDPQTLEILDITPCSFGGVSVITPGTNTSNQVAVLYQDVNCTEVPVAIHADQLTPTWRVYSTGSNVFQTRAGCLIGAEHVNNSYECDIPIGAGICASYQTQTNSPRRARSVASQSIGGGSGSLGAENSVAYSNNSIAIPTNFTISVTTEILPVSMTKTSVDCTMYICGDSTECSNLLLQYGSFCTQLNRALTGIAVEQDKNTQEVFAQVKQIYKTPPIKDFGGFNFSQILPDPSGGGSGSFIEDLLFNKVTLADAGFIKQYGDCLGDIAARDLICAQKFNGLTVLPPLLTDEMIAQYTSALLAGTITSGWTFGAGAALQIPFAMQMAYRFNGIGVTQNVLYENQKLIANQFNSAIGKIQDSLSSTASALGKLQDVVNQNAQALNTLVKQLSSNFGAISSVLNDILSRLDPPEAEVQIDRLITGRLQSLQTYVTQQLIRAAEIRASANLAATKMSECVLGQSKRVDFCGKGYHLMSFPQSAPHGVVFLHVTYVPAQEKNFTTAPAICHDGKAHFPREGVFVSNGTHWFVTQRNFYEPQIITTDNTFVSGNCDVVIGIVNNTVYDPLQPELDSFKEELDKYFKNHTSPDVDLGDISGINASVVNIQKEIDRLNEVAKNLNESLIDLQELGKYEQYIKWPWYIWLGFIAGLIAIVMVTIMLCCMTSCCSCLKGCCSCGSCCKFDEDDSEPVLKGVKLHYT

SEQ ID NO: 153 - protein, 1290 aa, Artificial Sequence
  Description of Artificial Sequence: Synthetic polypeptide
MDSKGSSQKGSRLLLLLVVSNLLLPQGVLAQCVNLTTRTQLPPAYTNSFTRGVYYPDKVFRSSVLHSTQDLFLPFFSNVTWFHAIHVSGTNGTKRFDNPVLPFNDGVYFASTEKSNIIRGWIFGTTLDSKTQSLLIVNNATNVVIKVCEFQFCNDPFLGVYYHKNNKSWMESEFRVYSSANNCTFEYVSQPFLMDLEGKQGNFKNLREFVFKNIDGYFKIYSKHTPINLVRDLPQGFSALEPLVDLPIGINITRFQTLLALHRSYLTPGDSSSGWTAGAAAYYVGYLQPRTFLLKYNENGTITDAVDCALDPLSETKCTLKSFTVEKGIYQTSNFRVQPTESIVRFPNITNLCPFGEVFNATRFASVYAWNRKRISNCVADYSVLYNSASFSTFKCYGVSPTKLNDLCFTNVYADSFVIRGDEVRQIAPGQTGKIADYNYKLPDDFTGCVIAWNSNNLDSKVGGNYNYLYRLFRKSNLKPFERDISTEIYQAGSTPCNGVEGFNCYFPLQSYGFQPTNGVGYQPYRVVVLSFELLHAPATVCGPKKSTNLVKNKCVNFNFNGLTGTGVLTESNKKFLPFQQFGRDIADTTDAVRDPQTLEILDITPCSFGGVSVITPGTNTSNQVAVLYQDVNCTEVPVAIHADQLTPTWRVYSTGSNVFQTRAGCLIGAEHVNNSYECDIPIGAGICASYQTQTNSPRRARSVASQSIGGGSGSLGAENSVAYSNNSIAIPTNFTISVTTEILPVSMTKTSVDCTMYICGDSTECSNLLLQYGSFCTQLNRALTGIAVEQDKNTQEVFAQVKQIYKTPPIKDFGGFNFSQILPDPSGGGSGSFIEDLLFNKVTLADAGFIKQYGDCLGDIAARDLICAQKFNGLTVLPPLLTDEMIAQYTSALLAGTITSGWTFGAGAALQIPFAMQMAYRFNGIGVTQNVLYENQKLIANQFNSAIGKIQDSLSSTASALGKLQDVVNQNAQALNTLVKQLSSNFGAISSVLNDILSRLDPPEAEVQIDRLITGRLQSLQTYVTQQLIRAAEIRASANLAATKMSECVLGQSKRVDFCGKGYHLMSFPQSAPHGVVFLHVTYVPAQEKNFTTAPAICHDGKAHFPREGVFVSNGTHWFVTQRNFYEPQIITTDNTFVSGNCDVVIGIVNNTVYDPLQPELDSFKEELDKYFKNHTSPDVDLGDISGINASVVNIQKEIDRLNEVAKNLNESLIDLQELGKYEQYIKWPWYIWLGFIAGLIAIVMVTIMLCCMTSCCSCLKGCCSCGSCCKFDEDDSEPVLKGVKLHYT

SEQ ID NO: 154 - protein, 1271 aa, Artificial Sequence
  Description of Artificial Sequence: Synthetic polypeptide
MDSKGSSQKGSRLLLLLVVSNLLLPQGVLAQCVNLTTRTQLPPAYTNSFTRGVYYPDKVFRSSVLHSTQDLFLPFFSNVTWFHAIHVSGTNGTKRFDNPVLPFNDGVYFASTEKSNIIRGWIFGTTLDSKTQSLLIVNNATNVVIKVCEFQFCNDPFLGVYYHKNNKSWMESEFRVYSSANNCTFEYVSQPFLMDLEGKQGNFKNLREFVFKNIDGYFKIYSKHTPINLVRDLPQGFSALEPLVDLPIGINITRFQTLLALHRSYLTPGDSSSGWTAGAAAYYVGYLQPRTFLLKYNENGTITDAVDCALDPLSETKCTLKSFTVEKGIYQTSNFRVQPTESIVRFPNITNLCPFGEVFNATRFASVYAWNRKRISNCVADYSVLYNSASFSTFKCYGVSPTKLNDLCFTNVYADSFVIRGDEVRQIAPGQTGKIADYNYKLPDDFTGCVIAWNSNNLDSKVGGNYNYLYRLFRKSNLKPFERDISTEIYQAGSTPCNGVEGFNCYFPLQSYGFQPTNGVGYQPYRVVVLSFELLHAPATVCGPKKSTNLVKNKCVNFNFNGLTGTGVLTESNKKFLPFQQFGRDIADTTDAVRDPQTLEILDITPCSFGGVSVITPGTNTSNQVAVLYQDVNCTEVPVAIHADQLTPTWRVYSTGSNVFQTRAGCLIGAEHVNNSYECDIPIGAGICASYQTQTNSPRRARSVASQSIIAYTMSLGAENSVAYSNNSIAIPTNFTISVTTEILPVSMTKTSVDCTMYICGDSTECSNLLLQYGSFCTQLNRALTGIAVEQDKNTQEVFAQVKQIYKTPPIKDFGGFNFSQILPDPSKPSKRSFIEDLLFNKVTLADAGFIKQYGDCLGDIAARDLICAQKFNGLTVLPPLLTDEMIAQYTSALLAGTITSGWTFGAGAALQIPFAMQMAYRFNGIGVTQNVLYENQKLIANQFNSAIGKIQDSLSSTASALGKLQDVVNQNAQALNTLVKQLSSNFGAISSVLNDILSRLDPPEAEVQIDRLITGRLQSLQTYVTQQLIRAAEIRASANLAATKMSECVLGQSKRVDFCGKGYHLMSFPQSAPHGVVFLHVTYVPAQEKNFTTAPAICHDGKAHFPREGVFVSNGTHWFVTQRNFYEPQIITTDNTFVSGNCDVVIGIVNNTVYDPLQPELDSFKEELDKYFKNHTSPDVDLGDISGINASVVNIQKEIDRLNEVAKNLNESLIDLQELGKYEQYIKGYIPEAPRDGQAYVRKDGEWVLLSTFLLEVLFQGPGSHHHHHH

SEQ ID NO: 155 - protein, 1263 aa, Artificial Sequence
  Description of Artificial Sequence: Synthetic polypeptide
MFLLTTKRTMFVFLVLLPLVSSQCVNLTTRTQLPPAYTNSFTRGVYYPDKVFRSSVLHSTQDLFLPFFSNVTWFHAIHVSGTNGTKRFDNPVLPFNDGVYFASTEKSNIIRGWIFGTTLDSKTQSLLIVNNATNVVIKVCEFQFCNDPFLGVYYHKNNKSWMESEFRVYSSANNCTFEYVSQPFLMDLEGKQGNFKNLREFVFKNIDGYFKIYSKHTPINLVRDLPQGFSALEPLVDLPIGINITRFQTLLALHRSYLTPGDSSSGWTAGAAAYYVGYLQPRTFLLKYNENGTITDAVDCALDPLSETKCTLKSFTVEKGIYQTSNFRVQPTESIVRFPNITNLCPFGEVFNATRFASVYAWNRKRISNCVADYSVLYNSASFSTFKCYGVSPTKLNDLCFTNVYADSFVIRGDEVRQIAPGQTGKIADYNYKLPDDFTGCVIAWNSNNLDSKVGGNYNYLYRLFRKSNLKPFERDISTEIYQAGSTPCNGVEGFNCYFPLQSYGFQPTNGVGYQPYRVVVLSFELLHAPATVCGPKKSTNLVKNKCVNFNFNGLTGTGVLTESNKKFLPFQQFGRDIADTTDAVRDPQTLEILDITPCSFGGVSVITPGTNTSNQVAVLYQDVNCTEVPVAIHADQLTPTWRVYSTGSNVFQTRAGCLIGAEHVNNSYECDIPIGAGICASYQTQTNSPRRARSVASQSIIAYTMSLGAENSVAYSNNSIAIPTNFTISVTTEILPVSMTKTSVDCTMYICGDSTECSNLLLQYGSFCTQLNRALTGIAVEQDKNTQEVFAQVKQIYKTPPIKDFGGFNFSQILPDPSKPSKRSFIEDLLFNKVTLADAGFIKQYGDCLGDIAARDLICAQKFNGLTVLPPLLTDEMIAQYTSALLAGTITSGWTFGAGAALQIPFAMQMAYRFNGIGVTQNVLYENQKLIANQFNSAIGKIQDSLSSTASALGKLQDVVNQNAQALNTLVKQLSSNFGAISSVLNDILSRLDPPEAEVQIDRLITGRLQSLQTYVTQQLIRAAEIRASANLAATKMSECVLGQSKRVDFCGKGYHLMSFPQSAPHGVVFLHVTYVPAQEKNFTTAPAICHDGKAHFPREGVFVSNGTHWFVTQRNFYEPQIITTDNTFVSGNCDVVIGIVNNTVYDPLQPELDSFKEELDKYFKNHTSPDVDLGDISGINASVVNIQKEIDRLNEVAKNLNESLIDLQELGKYEQYIKGYIPEAPRDGQAYVRKDGEWVLLSTFLLEVLFQGPGSHHHHHH

SEQ ID NO: 156 - protein, 1271 aa, Artificial Sequence
  Description of Artificial Sequence: Synthetic polypeptide
MDSKGSSQKGSRLLLLLVVSNLLLPQGVLAQCVNLTTRTQLPPAYTNSFTRGVYYPDKVFRSSVLHSTQDLFLPFFSNVTWFHAIHVSGTNGTKRFDNPVLPFNDGVYFASTEKSNIIRGWIFGTTLDSKTQSLLIVNNATNVVIKVCEFQFCNDPFLGVYYHKNNKSWMESEFRVYSSANNCTFEYVSQPFLMDLEGKQGNFKNLREFVFKNIDGYFKIYSKHTPINLVRDLPQGFSALEPLVDLPIGINITRFQTLLALHRSYLTPGDSSSGWTAGAAAYYVGYLQPRTFLLKYNENGTITDAVDCALDPLSETKCTLKSFTVEKGIYQTSNFRVQPTESIVRFPNITNLCPFGEVFNATRFASVYAWNRKRISNCVADYSVLYNSASFSTFKCYGVSPTKLNDLCFTNVYADSFVIRGDEVRQIAPGQTGKIADYNYKLPDDFTGCVIAWNSNNLDSKVGGNYNYLYRLFRKSNLKPFERDISTEIYQAGSTPCNGVEGFNCYFPLQSYGFQPTNGVGYQPYRVVVLSFELLHAPATVCGPKKSTNLVKNKCVNFNFNGLTGTGVLTESNKKFLPFQQFGRDIADTTDAVRDPQTLEILDITPCSFGGVSVITPGTNTSNQVAVLYQDVNCTEVPVAIHADQLTPTWRVYSTGSNVFQTRAGCLIGAEHVNNSYECDIPIGAGICASYQTQTNSPRRARSVASQSIGGGSGSLGAENSVAYSNNSIAIPTNFTISVTTEILPVSMTKTSVDCTMYICGDSTECSNLLLQYGSFCTQLNRALTGIAVEQDKNTQEVFAQVKQIYKTPPIKDFGGFNFSQILPDPSGGGSGSFIEDLLFNKVTLADAGFIKQYGDCLGDIAARDLICAQKFNGLTVLPPLLTDEMIAQYTSALLAGTITSGWTFGAGAALQIPFAMQMAYRFNGIGVTQNVLYENQKLIANQFNSAIGKIQDSLSSTASALGKLQDVVNQNAQALNTLVKQLSSNFGAISSVLNDILSRLDPPEAEVQIDRLITGRLQSLQTYVTQQLIRAAEIRASANLAATKMSECVLGQSKRVDFCGKGYHLMSFPQSAPHGVVFLHVTYVPAQEKNFTTAPAICHDGKAHFPREGVFVSNGTHWFVTQRNFYEPQIITTDNTFVSGNCDVVIGIVNNTVYDPLQPELDSFKEELDKYFKNHTSPDVDLGDISGINASVVNIQKEIDRLNEVAKNLNESLIDLQELGKYEQYIKGYIPEAPRDGQAYVRKDGEWVLLSTFLLEVLFQGPGSHHHHHH

SEQ ID NO: 157 - protein, 1263 aa, Artificial Sequence
  Description of Artificial Sequence: Synthetic polypeptide
MFLLTTKRTMFVFLVLLPLVSSQCVNLTTRTQLPPAYTNSFTRGVYYPDKVFRSSVLHSTQDLFLPFFSNVTWFHAIHVSGTNGTKRFDNPVLPFNDGVYFASTEKSNIIRGWIFGTTLDSKTQSLLIVNNATNVVIKVCEFQFCNDPFLGVYYHKNNKSWMESEFRVYSSANNCTFEYVSQPFLMDLEGKQGNFKNLREFVFKNIDGYFKIYSKHTPINLVRDLPQGFSALEPLVDLPIGINITRFQTLLALHRSYLTPGDSSSGWTAGAAAYYVGYLQPRTFLLKYNENGTITDAVDCALDPLSETKCTLKSFTVEKGIYQTSNFRVQPTESIVRFPNITNLCPFGEVFNATRFASVYAWNRKRISNCVADYSVLYNSASFSTFKCYGVSPTKLNDLCFTNVYADSFVIRGDEVRQIAPGQTGKIADYNYKLPDDFTGCVIAWNSNNLDSKVGGNYNYLYRLFRKSNLKPFERDISTEIYQAGSTPCNGVEGFNCYFPLQSYGFQPTNGVGYQPYRVVVLSFELLHAPATVCGPKKSTNLVKNKCVNFNFNGLTGTGVLTESNKKFLPFQQFGRDIADTTDAVRDPQTLEILDITPCSFGGVSVITPGTNTSNQVAVLYQDVNCTEVPVAIHADQLTPTWRVYSTGSNVFQTRAGCLIGAEHVNNSYECDIPIGAGICASYQTQTNSPRRARSVASQSIGGGSGSLGAENSVAYSNNSIAIPTNFTISVTTEILPVSMTKTSVDCTMYICGDSTECSNLLLQYGSFCTQLNRALTGIAVEQDKNTQEVFAQVKQIYKTPPIKDFGGFNFSQILPDPSGGGSGSFIEDLLFNKVTLADAGFIKQYGDCLGDIAARDLICAQKFNGLTVLPPLLTDEMIAQYTSALLAGTITSGWTFGAGAALQIPFAMQMAYRFNGIGVTQNVLYENQKLIANQFNSAIGKIQDSLSSTASALGKLQDVVNQNAQALNTLVKQLSSNFGAISSVLNDILSRLDPPEAEVQIDRLITGRLQSLQTYVTQQLIRAAEIRASANLAATKMSECVLGQSKRVDFCGKGYHLMSFPQSAPHGVVFLHVTYVPAQEKNFTTAPAICHDGKAHFPREGVFVSNGTHWFVTQRNFYEPQIITTDNTFVSGNCDVVIGIVNNTVYDPLQPELDSFKEELDKYFKNHTSPDVDLGDISGINASVVNIQKEIDRLNEVAKNLNESLIDLQELGKYEQYIKGYIPEAPRDGQAYVRKDGEWVLLSTFLLEVLFQGPGSHHHHHH

SEQ ID NO: 158 - protein, 1208 aa, Artificial Sequence; identical to SEQ ID NO: 35
  Description of Artificial Sequence: Synthetic polypeptide

SEQ ID NO: 159 - protein, 1273 aa, Artificial Sequence; identical to SEQ ID NO: 125
  Description of Artificial Sequence: Synthetic polypeptide

SEQ ID NO: 160 - protein, 442 aa, Artificial Sequence
  Description of Artificial Sequence: Synthetic polypeptide
MPMGSLQPLATLYLLGMLVASVLARVQPTESIVRFPNITNLCPFGEVFNATRFASVYAWNRKRISNCVADYSVLYNSASFSTFKCYGVSPTKLNDLCFTNVYADSFVIRGDEVRQIAPGQTGKIADYNYKLPDDFTGCVIAWNSNNLDSKVGGNYNYLYRLFRKSNLKPFERDISTEIYQAGSTPCNGVEGFNCYFPLQSYGFQPTNGVGYQPYRVVVLSFELLHAPATVCGPKKSTNLVKNKCVNFGGGGSGESQVRQQFSKDIEKLLNEQVNKEMQSSNLYMSMSSWCYTHSLDGAGLFLFDHAAEEYEHAKKLIIFLNENNVPVQLTSISAPEHKFEGLTQIFQKAYEHEQHISESINNIVDHAIKSKDHATFNFLQWYVAEQHEEEVLFKDILDKIELIGNENHGLYLADQYVKGIAKSRKSLEVLFQGPGSHHHHHH

SEQ ID NO: 161 - protein, 439 aa, Artificial Sequence
  Description of Artificial Sequence: Synthetic polypeptide
MPMGSLQPLATLYLLGMLVASVLARVQPTESIVRFPNITNLCPFGEVFNATRFASVYAWNRKRISNCVADYSVLYNSASFSTFKCYGVSPTKLNDLCFTNVYADSFVIRGDEVRQIAPGQTGKIADYNYKLPDDFTGCVIAWNSNNLDSKVGGNYNYLYRLFRKSNLKPFERDISTEIYQAGSTPCNGVEGFNCYFPLQSYGFQPTNGVGYQPYRVVVLSFELLHAPATVCGPKKSTNLVKNKCVNFGGGSGGGGSGLSKDIIKLLNEQVNKEMNSSNLYMSMSSWCYTHSLDGAGLFLFDHAAEEYEHAKKLIIFLNENNVPVQLTSISAPEHKFEGLTQIFQKAYEHEQHISESINNIVDHAIKSKDHATFNFLQWYVAEQHEEEVLFKDILDKIELIGNENHGLYLADQYVKGIAKSRKSLEVLFQGPGSHHHHHH

SEQ ID NO: 162 - protein, 1446 aa, Artificial Sequence
  Description of Artificial Sequence: Synthetic polypeptide
MPMGSLQPLATLYLLGMLVASVLAQCVNLTTRTQLPPAYTNSFTRGVYYPDKVFRSSVLHSTQDLFLPFFSNVTWFHAIHVSGTNGTKRFDNPVLPFNDGVYFASTEKSNIIRGWIFGTTLDSKTQSLLIVNNATNVVIKVCEFQFCNDPFLGVYYHKNNKSWMESEFRVYSSANNCTFEYVSQPFLMDLEGKQGNFKNLREFVFKNIDGYFKIYSKHTPINLVRDLPQGFSALEPLVDLPIGINITRFQTLLALHRSYLTPGDSSSGWTAGAAAYYVGYLQPRTFLLKYNENGTITDAVDCALDPLSETKCTLKSFTVEKGIYQTSNFRVQPTESIVRFPNITNLCPFGEVFNATRFASVYAWNRKRISNCVADYSVLYNSASFSTFKCYGVSPTKLNDLCFTNVYADSFVIRGDEVRQIAPGQTGKIADYNYKLPDDFTGCVIAWNSNNLDSKVGGNYNYLYRLFRKSNLKPFERDISTEIYQAGSTPCNGVEGFNCYFPLQSYGFQPTNGVGYQPYRVVVLSFELLHAPATVCGPKKSTNLVKNKCVNFNFNGLTGTGVLTESNKKFLPFQQFGRDIADTTDAVRDPQTLEILDITPCSFGGVSVITPGTNTSNQVAVLYQDVNCTEVPVAIHADQLTPTWRVYSTGSNVFQTRAGCLIGAEHVNNSYECDIPIGAGICASYQTQTNSPGSASSVASQSIIAYTMSLGAENSVAYSNNSIAIPTNFTISVTTEILPVSMTKTSVDCTMYICGDSTECSNLLLQYGSFCTQLNRALTGIAVEQDKNTQEVFAQVKQIYKTPPIKDFGGFNFSQILPDPSKPSKRSFIEDLLFNKVTLADAGFIKQYGDCLGDIAARDLICAQKFNGLTVLPPLLTDEMIAQYTSALLAGTITSGWTFGAGAALQIPFAMQMAYRFNGIGVTQNVLYENQKLIANQFNSAIGKIQDSLSSTASALGKLQDVVNQNAQALNTLVKQLSSNFGAISSVLNDILSRLDPPEAEVQIDRLITGRLQSLQTYVTQQLIRAAEIRASANLAATKMSECVLGQSKRVDFCGKGYHLMSFPQSAPHGVVFLHVTYVPAQEKNFTTAPAICHDGKAHFPREGVFVSNGTHWFVTQRNFYEPQIITTDNTFVSGNCDVVIGIVNNTVYDPLQPELDSFKEELDKYFKNHTSPDVDLGDISGINASVVNIQKEIDRLNEVAKNLNESLIDLQELGKYEQGSGYIPEAPRDGQAYVRKDGEWVLLSTFLGRSGGGGSGESQVRQQFSKDIEKLLNEQVNKEMQSSNLYMSMSSWCYTHSLDGAGLFLFDHAAEEYEHAKKLIIFLNENNVPVQLTSISAPEHKFEGLTQIFQKAYEHEQHISESINNIVDHAIKSKDHATFNFLQWYVAEQHEEEVLFKDILDKIELIGNENHGLYLADQYVKGIAKSRKSLEVLFQGPGSHHHHHH

SEQ ID NO: 163 - protein, 1443 aa, Artificial Sequence
  Description of Artificial Sequence: Synthetic polypeptide
MPMGSLQPLATLYLLGMLVASVLAQCVNLTTRTQLPPAYTNSFTRGVYYPDKVFRSSVLHSTQDLFLPFFSNVTWFHAIHVSGTNGTKRFDNPVLPFNDGVYFASTEKSNIIRGWIFGTTLDSKTQSLLIVNNATNVVIKVCEFQFCNDPFLGVYYHKNNKSWMESEFRVYSSANNCTFEYVSQPFLMDLEGKQGNFKNLREFVFKNIDGYFKIYSKHTPINLVRDLPQGFSALEPLVDLPIGINITRFQTLLALHRSYLTPGDSSSGWTAGAAAYYVGYLQPRTFLLKYNENGTITDAVDCALDPLSETKCTLKSFTVEKGIYQTSNFRVQPTESIVRFPNITNLCPFGEVFNATRFASVYAWNRKRISNCVADYSVLYNSASFSTFKCYGVSPTKLNDLCFTNVYADSFVIRGDEVRQIAPGQTGKIADYNYKLPDDFTGCVIAWNSNNLDSKVGGNYNYLYRLFRKSNLKPFERDISTEIYQAGSTPCNGVEGFNCYFPLQSYGFQPTNGVGYQPYRVVVLSFELLHAPATVCGPKKSTNLVKNKCVNFNFNGLTGTGVLTESNKKFLPFQQFGRDIADTTDAVRDPQTLEILDITPCSFGGVSVITPGTNTSNQVAVLYQDVNCTEVPVAIHADQLTPTWRVYSTGSNVFQTRAGCLIGAEHVNNSYECDIPIGAGICASYQTQTNSPGSASSVASQSIIAYTMSLGAENSVAYSNNSIAIPTNFTISVTTEILPVSMTKTSVDCTMYICGDSTECSNLLLQYGSFCTQLNRALTGIAVEQDKNTQEVFAQVKQIYKTPPIKDFGGFNFSQILPDPSKPSKRSFIEDLLFNKVTLADAGFIKQYGDCLGDIAARDLICAQKFNGLTVLPPLLTDEMIAQYTSALLAGTITSGWTFGAGAALQIPFAMQMAYRFNGIGVTQNVLYENQKLIANQFNSAIGKIQDSLSSTASALGKLQDVVNQNAQALNTLVKQLSSNFGAISSVLNDILSRLDPPEAEVQIDRLITGRLQSLQTYVTQQLIRAAEIRASANLAATKMSECVLGQSKRVDFCGKGYHLMSFPQSAPHGVVFLHVTYVPAQEKNFTTAPAICHDGKAHFPREGVFVSNGTHWFVTQRNFYEPQIITTDNTFVSGNCDVVIGIVNNTVYDPLQPELDSFKEELDKYFKNHTSPDVDLGDISGINASVVNIQKEIDRLNEVAKNLNESLIDLQELGKYEQGSGYIPEAPRDGQAYVRKDGEWVLLSTFLGRSGGGSGGGGSGLSKDIIKLLNEQVNKEMNSSNLYMSMSSWCYTHSLDGAGLFLFDHAAEEYEHAKKLIIFLNENNVPVQLTSISAPEHKFEGLTQIFQKAYEHEQHISESINNIVDHAIKSKDHATFNFLQWYVAEQHEEEVLFKDILDKIELIGNENHGLYLADQYVKGIAKSRKSLEVLFQGPGSHHHHHH

SEQ ID NO: 164 - protein, 253 aa, Artificial Sequence
  Description of Artificial Sequence: Synthetic polypeptide
MPMGSLQPLATLYLLGMLVASVLAIYQAGSTPCNGVEGFNCYFPLQSYGFQPTNGVGYGGGGSGESQVRQQFSKDIEKLLNEQVNKEMQSSNLYMSMSSWCYTHSLDGAGLFLFDHAAEEYEHAKKLIIFLNENNVPVQLTSISAPEHKFEGLTQIFQKAYEHEQHISESINNIVDHAIKSKDHATFNFLQWYVAEQHEEEVLFKDILDKIELIGNENHGLYLADQYVKGIAKSRKSLEVLFQGPGSHHHHHH

SEQ ID NO: 165 - protein, 250 aa, Artificial Sequence
  Description of Artificial Sequence: Synthetic polypeptide
MPMGSLQPLATLYLLGMLVASVLAIYQAGSTPCNGVEGFNCYFPLQSYGFQPTNGVGYGGGSGGGGSGLSKDIIKLLNEQVNKEMNSSNLYMSMSSWCYTHSLDGAGLFLFDHAAEEYEHAKKLIIFLNENNVPVQLTSISAPEHKFEGLTQIFQKAYEHEQHISESINNIVDHAIKSKDHATFNFLQWYVAEQHEEEVLFKDILDKIELIGNENHGLYLADQYVKGIAKSRKSLEVLFQGPGSHHHHHH

SEQ ID NO: 166 - protein, 321 aa, Artificial Sequence
  Description of Artificial Sequence: Synthetic polypeptide
MPMGSLQPLATLYLLGMLVASVLAIYQAGSTPCNGVEGFNCYFPLQSYGFQPTNGVGYIYQAGSTPCNGVEGFNCYFPLQSYGFQPTNGVGYIYQAGSTPCNGVEGFNCYFPLQSYGFQPTNGVGYGGGGSGESQVRQQFSKDIEKLLNEQVNKEMQSSNLYMSMSSWCYTHSLDGAGLFLFDHAAEEYEHAKKLIIFLNENNVPVQLTSISAPEHKFEGLTQIFQKAYEHEQHISESINNIVDHAIKSKDHATFNFLQWYVAEQHEEEVLFKDILDKIELIGNENHGLYLADQYVKGIAKSRKSLEVLFQGPGSHHHHHH

SEQ ID NO: 167 - protein, 318 aa, Artificial Sequence
  Description of Artificial Sequence: Synthetic polypeptide
MPMGSLQPLATLYLLGMLVASVLAIYQAGSTPCNGVEGFNCYFPLQSYGFQPTNGVGYIYQAGSTPCNGVEGFNCYFPLQSYGFQPTNGVGYIYQAGSTPCNGVEGFNCYFPLQSYGFQPTNGVGYGGGSGGGGSGLSKDIIKLLNEQVNKEMNSSNLYMSMSSWCYTHSLDGAGLFLFDHAAEEYEHAKKLIIFLNENNVPVQLTSISAPEHKFEGLTQIFQKAYEHEQHISESINNIVDHAIKSKDHATFNFLQWYVAEQHEEEVLFKDILDKIELIGNENHGLYLADQYVKGIAKSRKSLEVLFQGPGSHHHHHH

SEQ ID NO: 168 - DNA, 3623 bp, Artificial Sequence
  Description of Artificial Sequence: Synthetic polynucleotide
tgttcgtgttcctggtgctcctgcctctggtgagcagccagtgcgtgaacctgaccacccgaacccagctcccaccagcctacaccaacagctttacacggggcgtgtactaccctgacaaggtgttcagatctagcgtcctgcacagcactcaggacctcttcctgccgttcttcagcaacgtgacatggttccacgccatccacgtgagcggcacaaacggaaccaagcggtttgataaccccgtcctgccattcaatgatggagtttacttcgccagtaccgagaagagtaacatcatccggggctggatcttcggcaccaccctggatagcaaaacacagagcctcctgatcgtgaacaatgccacgaacgtcgtgatcaaggtgtgcgagttccagttttgcaatgatcctttcctgggtgtgtactaccacaagaacaacaagagctggatggaaagcgagttcagagtctacagcagcgccaacaactgcacattcgagtacgtctctcagccttttctgatggaccttgaggggaaacaaggcaacttcaagaacctgagagaattcgtgttcaagaacatcgacggctacttcaaaatctactccaagcacacacccatcaacctggtccgggacctccctcagggcttcagcgccctggaacccctggtcgacctgcccataggcatcaacataacgcggttccaaaccctgctggccctgcatagatcctacctgactcctggcgacagcagcagcggatggaccgccggagctgcagcctactatgtgggctacctgcaacctagaaccttcctgctgaagtacaacgagaacggcacaatcacagacgccgtcgactgcgccctggaccctctctctgagacaaagtgcaccctgaagtccttcaccgtggaaaagggcatctaccagaccagcaacttccgggtgcagcctacagagagcatcgtgcgatttccaaacattaccaacctctgccccttcggcgaggtgtttaacgccacaagatttgcctccgtttacgcctggaatagaaagagaatcagcaattgtgtggccgactactccgtgctgtataacagcgcctctttcagcaccttcaagtgctacggcgtttgcccaacaaagctgaatgacctgtgcttcaccaacgtgtacgccgactccttcgtaattagaggcgatgaggtgcggcagatcgcaccaggccagaccggtaagatcgctgactacaactataagctgcctgatgattttacaggctgcgtgatcgcctggaactctaacaacctggatagcaaggtgggcggcaactacaactacctgtaccggctgtttcgcaagtctaacctgaaacctttcgagagagacatctccacagagatctaccaggccggttctacaccttgtaacggggtggaaggcttcaactgttacttccctctgcaaagctacggcttccagcctaccaatggagtcggctaccagccataccgggtggtcgtgctgtccttcgagttactccacgcccccgccaccgtctgcggtcctaagaagtccaccaatctggttaagaacaaatgcgtgaacttcaacttcaacggcctgaccgggaccggcgtgctgaccgaaagcaacaaaaagttcctccccttccagcagttcggccgtgatatcgctgacaccacagatgccgtcagagatccacagaccctggaaatcctggatattacaccctgctccttcggaggagtttctgtgatcacccccgggaccaataccagcaaccaggtggctgtgctgtaccaagatgttaactgcaccgaggttcctgtggccatccacgccgatcagctgacacctacttggagagtgtactccactggctccaatgtgttccagaccagggccggatgtctgatcggcgccgagcacgtgaataacagttacgagtgcgacatccctatcggcgccggcatctgtgccagctaccagacccagacaaacagccctgggtctgcttcctctgtagctagccagagcatcatcgcctacaccatgagcctgggcgcagagaacagcgtggcctattccaacaactctatcgccattcccaccaactttacaattagcgtcacaacagagatcctgcccgtgagcatgaccaagaccagcgtggactgtacaatgtacatctgtggcgacagcactgaatgcagcaacctgctgctgcaatacggctccttttgcacccaactgaaccgggcgctgaccggaatcgccgtggaacaggacaaaaatacccaggaggtgttcgcccaagtgaagcagatctacaagaccccacctatcaaggacttcggcggctttaactttagccagattctccctgatccttctaagcctagcaagcggagccctatcgaggatctgctgttcaacaaggtcaccctggccgatgccggctttatcaaacagtatggcgattgcctgggcgacatagccgccagagatctgatctgcgcccagaaattcaacggcctgacagttctcccacctctgctgaccgacgagatgatcgctcagtacacctctgccctgctggctggcaccatcacatctgggtggacatttggcgccggccccgccctgcagatcccctttcccatgcagatggcctatagattcaacggaatcggcgtgacccagaacgtgctgtatgaaaaccagaagctgatcgctaaccagttcaattctgccatcggcaagatccaggactccctctcctctacccccagcgccctgggcaaactgcaggacgtggtgaatcagaacgcccaagccctgaacaccctggtgaagcagctcagcagcaattttggcgccatcagctctgtgctgaacgatatcctgtctagactgtgccctccagaagccgaagtccagatcgatagactgatcacaggcagactgcagtccctgcaaacctacgtgacccaacagctgatcagggccgctgaaataagagccagcgccaatctcgccgctaccaagatgtccgagtgtgtgctgggacagtctaaacgcgttgacttctgcggcaaaggctatcacctgatgagcttcccccagagcgcgccgcacggcgtggtgttcctgcatgtgacatacgtgcctgcccaagagaagaatttcacaaccgcccctgccatctgccacgacggcaaggcccacttcccaagagagggcgttttcgtttccaatggcacacactggttcgtgacacaaagaaacttctacgaaccccagattatcaccaccgacaacaccttcgtgagtggcaattgtgacgtggtcatcggaatcgtgaacaacacagtgtacgaccctctgcaacctgagctggactcttttaaggaagagctggacaagtactttaaaaaccacaccagccccgatgtggacctgggcgacatcagtggcattaacgccagcgtggtgaacatccaaaaggaaatcgacagactgaacgaggtggccaagaacctgaacgagtccctgatcgacctgcaggagctcggcaaatacgagcag

SEQ ID NO: 169 - protein, 1208 aa, Artificial Sequence
  Description of Artificial Sequence: Synthetic polypeptide
MFVFLVLLPLVSSQCVNLTTRTQLPPAYTNSFTRGVYYPDKVFRSSVLHSTQDLFLPFFSNVTWFHAIHVSGTNGTKRFDNPVLPFNDGVYFASTEKSNIIRGWIFGTTLDSKTQSLLIVNNATNVVIKVCEFQFCNDPFLGVYYHKNNKSWMESEFRVYSSANNCTFEYVSQPFLMDLEGKQGNFKNLREFVFKNIDGYFKIYSKHTPINLVRDLPQGFSALEPLVDLPIGINITRFQTLLALHRSYLTPGDSSSGWTAGAAAYYVGYLQPRTFLLKYNENGTITDAVDCALDPLSETKCTLKSFTVEKGIYQTSNFRVQPTESIVRFPNITNLCPFGEVFNATRFASVYAWNRKRISNCVADYSVLYNSASFSTFKCYGVCPTKLNDLCFTNVYADSFVIRGDEVRQIAPGQTGKIADYNYKLPDDFTGCVIAWNSNNLDSKVGGNYNYLYRLFRKSNLKPFERDISTEIYQAGSTPCNGVEGFNCYFPLQSYGFQPTNGVGYQPYRVVVLSFELLHAPATVCGPKKSTNLVKNKCVNFNFNGLTGTGVLTESNKKFLPFQQFGRDIADTTDAVRDPQTLEILDITPCSFGGVSVITPGTNTSNQVAVLYQDVNCTEVPVAIHADQLTPTWRVYSTGSNVFQTRAGCLIGAEHVNNSYECDIPIGAGICASYQTQTNSPGSASSVASQSIIAYTMSLGAENSVAYSNNSIAIPTNFTISVTTEILPVSMTKTSVDCTMYICGDSTECSNLLLQYGSFCTQLNRALTGIAVEQDKNTQEVFAQVKQIYKTPPIKDFGGFNFSQILPDPSKPSKRSPIEDLLFNKVTLADAGFIKQYGDCLGDIAARDLICAQKFNGLTVLPPLLTDEMIAQYTSALLAGTITSGWTFGAGPALQIPFPMQMAYRFNGIGVTQNVLYENQKLIANQFNSAIGKIQDSLSSTPSALGKLQDVVNQNAQALNTLVKQLSSNFGAISSVLNDILSRLCPPEAEVQIDRLITGRLQSLQTYVTQQLIRAAEIRASANLAATKMSECVLGQSKRVDFCGKGYHLMSFPQSAPHGVVFLHVTYVPAQEKNFTTAPAICHDGKAHFPREGVFVSNGTHWFVTQRNFYEPQIITTDNTFVSGNCDVVIGIVNNTVYDPLQPELDSFKEELDKYFKNHTSPDVDLGDISGINASVVNIQKEIDRLNEVAKNLNESLIDLQELGKYEQ

SEQ ID NO: 170 - DNA, 3624 bp, Artificial Sequence
  Description of Artificial Sequence: Synthetic polynucleotide
atgttcgtgttcctggtgctcctgcctctggtgagcagccagtgcgtgaacctgaccacccgaacccagctcccaccagcctacaccaacagctttacacggggcgtgtactaccctgacaaggtgttcagatctagcgtcctgcacagcactcaggacctcttcctgccgttcttcagcaacgtgacatggttccacgccatccacgtgagcggcacaaacggaaccaagcggtttgataaccccgtcctgccattcaatgatggagtttacttcgccagtaccgagaagagtaacatcatccggggctggatcttcggcaccaccctggatagcaaaacacagagcctcctgatcgtgaacaatgccacgaacgtcgtgatcaaggtgtgcgagttccagttttgcaatgatcctttcctgggtgtgtactaccacaagaacaacaagagctggatggaaagcgagttcagagtctacagcagcgccaacaactgcacattcgagtacgtctctcagccttttctgatggaccttgaggggaaacaaggcaacttcaagaacctgagagaattcgtgttcaagaacatcgacggctacttcaaaatctactccaagcacacacccatcaacctggtccgggacctccctcagggcttcagcgccctggaacccctggtcgacctgcccataggcatcaacataacgcggttccaaaccctgctggccctgcatagatcctacctgactcctggcgacagcagcagcggatggaccgccggagctgcagcctactatgtgggctacctgcaacctagaaccttcctgctgaagtacaacgagaacggcacaatcacagacgccgtcgactgcgccctggaccctctctctgagacaaagtgcaccctgaagtccttcaccgtggaaaagggcatctaccagaccagcaacttccgggtgcagcctacagagagcatcgtgcgatttccaaacattaccaacctctgccccttcggcgaggtgtttaacgccacaagatttgcctccgtttacgcctggaatagaaagagaatcagcaattgtgtggccgactactccgtgctgtataacagcgcctctttcagcaccttcaagtgctacggcgtttccccaacaaagctgaatgacctgtgcttcaccaacgtgtacgccgactccttcgtaattagaggcgatgaggtgcggcagatcgcaccaggccagaccggtaagatcgctgactacaactataagctgcctgatgattttacaggctgcgtgatcgcctggaactctaacaacctggatagcaaggtgggcggcaactacaactacctgtaccggctgtttcgcaagtctaacctgaaacctttcgagagagacatctccacagagatctaccaggccggttctacaccttgtaacggggtggaaggcttcaactgttacttccctctgcaaagctacggcttccagcctaccaatggagtcggctaccagccataccgggtggtcgtgctgtccttcgagttactccacgcccccgccaccgtctgcggtcctaagaagtccaccaatctggttaagaacaaatgcgtgaacttcaacttcaacggcctgaccgggaccggcgtgctgaccgaaagcaacaaaaagttcctccccttccagcagttcggccgtgatatcctggacatcacagatgccgtcagagatccacagaccctggaaatcctggatattacaccctgctccttcggaggagtttctgtgatcacccccgggaccaataccagcaaccaggtggctgtgctgtaccaagatgttaactgcaccgaggttcctgtggccatccacgccgatcagctgacacctacttggagagtgtactccactggctccaatgtgttccagaccagggccggatgtctgatcggcgccgagcacgtgaataacagttacgagtgcgacatccctatcggcgccggcatctgtgccagctaccagacccagacaaacagccctgggtctgcttcctctgtagctagccagagcatcatcgcctacaccatgagcctgggcgcagagaacagcgtggcctattccaacaactctatcgccattcccaccaactttacaattagcgtcacaacagagatcctgcccgtgagcatgaccaagaccagcgtggactgtacaatgtacatctgtggcgacagcactgaatgcagcaacctgctgctgcaatacggctccttttgcacccaactgaaccgggcgctgaccggaatcgccgtggaacaggacaaaaatacccaggaggtgttcgcccaagtgaagcagatctacaagaccccacctatcaaggacttcggcggctttaactttagccagattctccctgatccttctaagcctagcaagcggagccctatcgaggatctgctgttcaacaaggtcaccctggccgatgccggctttatcaaacagtatggcgattgcctgggcgacatagccgccagagatctgatctgcgcccagaaatacatcggcctgacagttctcccacctctgctgaccgacgagatgatcgctcagtacacctctgccctgctggctggcaccatcacatctgggtggacatttggcgccggccccgccctgcagatcccctttcccatgcagatggcctatagattcaacggaatcggcgtgacccagaacgtgctgtatgaaaaccagaagctgatcgctaaccagttcaattctgccatcggcaagatccaggactccctctcctctacccccagcgccctgggcaaactgcaggacgtggtgaatcagaacgcccaagccctgaacaccctggtgaagcagctcagcagcaattttggcgccatcagctctgtgctgaacgatatcctgtctagactggaccctccagaagccgaagtccagatcgatagactgatcacaggcagactgcagtccctgcaaacctacgtgacccaacagctgatcagggccgctgaaataagagccagcgccaatctcgccgctaccaagatgtccgagtgtgtgctgggacagtctaaacgcgttgacttctgcggcaaaggctatcacctgatgagcttcccccagagcgcgccgcacggcgtggtgttcctgcatgtgacatacgtgcctgcccaagagaagaatttcacaaccgcccctgccatctgccacgacggcaaggcccacttcccaagagagggcgttttcgtttccaatggcacacactggttcgtgacacaaagaaacttctacgaaccccagattatcaccaccgacaacaccttcgtgagtggcaattgtgacgtggtcatcggaatcgtgaacaacacagtgtacgaccctctgcaacctgagctggactcttttaaggaagagctggacaagtactttaaaaaccacaccagccccgatgtggacctgggcgacatcagtggcattaacgccagcgtggtgaacatccaaaaggaaatcgacagactgaacgaggtggccaagaacctgaacgagtccctgatcgacctgcaggagctcggcaaatacgagcag

SEQ ID NO: 171 - protein, 1208 aa, Artificial Sequence
  Description of Artificial Sequence: Synthetic polypeptide
MFVFLVLLPLVSSQCVNLTTRTQLPPAYTNSFTRGVYYPDKVFRSSVLHSTQDLFLPFFSNVTWFHAIHVSGTNGTKRFDNPVLPFNDGVYFASTEKSNIIRGWIFGTTLDSKTQSLLIVNNATNVVIKVCEFQFCNDPFLGVYYHKNNKSWMESEFRVYSSANNCTFEYVSQPFLMDLEGKQGNFKNLREFVFKNIDGYFKIYSKHTPINLVRDLPQGFSALEPLVDLPIGINITRFQTLLALHRSYLTPGDSSSGWTAGAAAYYVGYLQPRTFLLKYNENGTITDAVDCALDPLSETKCTLKSFTVEKGIYQTSNFRVQPTESIVRFPNITNLCPFGEVFNATRFASVYAWNRKRISNCVADYSVLYNSASFSTFKCYGVSPTKLNDLCFTNVYADSFVIRGDEVRQIAPGQTGKIADYNYKLPDDFTGCVIAWNSNNLDSKVGGNYNYLYRLFRKSNLKPFERDISTEIYQAGSTPCNGVEGFNCYFPLQSYGFQPTNGVGYQPYRVVVLSFELLHAPATVCGPKKSTNLVKNKCVNFNFNGLTGTGVLTESNKKFLPFQQFGRDILDITDAVRDPQTLEILDITPCSFGGVSVITPGTNTSNQVAVLYQDVNCTEVPVAIHADQLTPTWRVYSTGSNVFQTRAGCLIGAEHVNNSYECDIPIGAGICASYQTQTNSPGSASSVASQSIIAYTMSLGAENSVAYSNNSIAIPTNFTISVTTEILPVSMTKTSVDCTMYICGDSTECSNLLLQYGSFCTQLNRALTGIAVEQDKNTQEVFAQVKQIYKTPPIKDFGGFNFSQILPDPSKPSKRSPIEDLLFNKVTLADAGFIKQYGDCLGDIAARDLICAQKYIGLTVLPPLLTDEMIAQYTSALLAGTITSGWTFGAGPALQIPFPMQMAYRFNGIGVTQNVLYENQKLIANQFNSAIGKIQDSLSSTPSALGKLQDVVNQNAQALNTLVKQLSSNFGAISSVLNDILSRLDPPEAEVQIDRLITGRLQSLQTYVTQQLIRAAEIRASANLAATKMSECVLGQSKRVDFCGKGYHLMSFPQSAPHGVVFLHVTYVPAQEKNFTTAPAICHDGKAHFPREGVFVSNGTHWFVTQRNFYEPQIITTDNTFVSGNCDVVIGIVNNTVYDPLQPELDSFKEELDKYFKNHTSPDVDLGDISGINASVVNIQKEIDRLNEVAKNLNESLIDLQELGKYEQ

SEQ ID NO: 172 - protein, 1208 aa, Severe acute respiratory syndrome coronavirus 2; identical to SEQ ID NO: 6

SEQ ID NO: 173 - protein, 1208 aa, Artificial Sequence
  Description of Artificial Sequence: Synthetic polypeptide
MFVFLVLLPLVSSQCVNLTTRTQLPPAYTNSFTRGVYYPDKVFRSSVLHSTQDLFLPFFSNVTWFHAIHVSGTNGTKRFDNPVLPFNDGVYFASTEKSNIIRGWIFGTTLDSKTQSLLIVNNATNVVIKVCEFQFCNDPFLGVYYHKNNKSWMESEFRVYSSANACTFEYVSQPFLMDLEGKQGNFKNLREFVFKNIDGYFKIYSKHTPINLVRDLPQGFSALEPLVDLPIGINITRFQTLLALHRSYLTPGDSSSGWTAGAAAYYVGYLQPRTFLLKYNENGTITDAVDCALDPLSETKCTLKSFTVEKGIYQTSNFRVQPTESIVRFPNITNLCPFGEVFNATRFASVYAWNRKRISNCVADYSVLYNSASFSTFKCYGVSPTKLNDLCFTNVYADSFVIRGDEVRQIAPGQTGKIADYNYKLPDDFTGCVIAWNSNNLDSKVGGNYNYLYRLFRKSNLKPFERDISTEIYQAGSTPCNGVEGFNCYFPLQSYGFQPTNGVGYQPYRVVVLSFELLHAPATVCGPKKSTNLVKNKCVNFNFNGLTGTGVLTESNKKFLPFQQFGRDIADTTDAVRDPQTLEILDITPCSFGGVSVITPGTNTSNQVAVLYQDVNCTEVPVAIHADQLTPTWRVYSTGSNVFQTRAGCLIGAEHVNNSYECDIPIGAGICASYQTQTNSPGSASSVASQSIIAYTMSLGAENSVAYSNNSIAIPTNFTISVTTEILPVSMTKTSVDCTMYICGDSTECSNLLLQYGSFCTQLNRALTGIAVEQDKNTQEVFAQVKQIYKTPPIKDFGGFNFSQILPDPSKPSKRSFIEDLLFNKVTLADAGFIKQYGDCLGDIAARDLICAQKFNGLTVLPPLLTDEMIAQYTSALLAGTITSGWTFGAGAALQIPFAMQMAYRFNGIGVTQNVLYENQKLIANQFNSAIGKIQDSLSSTASALGKLQDVVNQNAQALNTLVKQLSSNFGAISSVLNDILSRLDPPEAEVQIDRLITGRLQSLQTYVTQQLIRAAEIRASANLAATKMSECVLGQSKRVDFCGKGYHLMSFPQSAPHGVVFLHVTYVPAQEKNFTTAPAICHDGKAHFPREGVFVSNGTHWFVTQRNFYEPQIITTDNTFVSGNCDVVIGIVNNTVYDPLQPELDSFKEELDKYFKNHTSPDVDLGDISGINASVVNIQKEIDRLNEVAKNLNESLIDLQELGKYEQ

SEQ ID NO: 174 - protein, 1208 aa, Artificial Sequence
  Description of Artificial Sequence: Synthetic polypeptide
MFVFLVLLPLVSSQCVNLTTRTQLPPAYTNSFTRGVYYPDKVFRSSVLHSTQDLFLPFFSNVTWFHAIHVSGTNGTKRFDNPVLPFNDGVYFASTEKSNIIRGWIFGTTLDSKTQSLLIVNNATNVVIKVCEFQFCNDPFLGVYYHKNNKSWMESEFRVYSSANNCTFEYVSQPFLMDLEGKQGNFKNLREFVFKNIDGYFKIYSKHTPINLVRDLPQGFSALEPLVDLPIGIAITRFQTLLALHRSYLTPGDSSSGWTAGAAAYYVGYLQPRTFLLKYNENGTITDAVDCALDPLSETKCTLKSFTVEKGIYQTSNFRVQPTESIVRFPNITNLCPFGEVFNATRFASVYAWNRKRISNCVADYSVLYNSASFSTFKCYGVSPTKLNDLCFTNVYADSFVIRGDEVRQIAPGQTGKIADYNYKLPDDFTGCVIAWNSNNLDSKVGGNYNYLYRLFRKSNLKPFERDISTEIYQAGSTPCNGVEGFNCYFPLQSYGFQPTNGVGYQPYRVVVLSFELLHAPATVCGPKKSTNLVKNKCVNFNFNGLTGTGVLTESNKKFLPFQQFGRDIADTTDAVRDPQTLEILDITPCSFGGVSVITPGTNTSNQVAVLYQDVNCTEVPVAIHADQLTPTWRVYSTGSNVFQTRAGCLIGAEHVNNSYECDIPIGAGICASYQTQTNSPGSASSVASQSIIAYTMSLGAENSVAYSNNSIAIPTNFTISVTTEILPVSMTKTSVDCTMYICGDSTECSNLLLQYGSFCTQLNRALTGIAVEQDKNTQEVFAQVKQIYKTPPIKDFGGFNFSQILPDPSKPSKRSFIEDLLFNKVTLADAGFIKQYGDCLGDIAARDLICAQKFNGLTVLPPLLTDEMIAQYTSALLAGTITSGWTFGAGAALQIPFAMQMAYRFNGIGVTQNVLYENQKLIANQFNSAIGKIQDSLSSTASALGKLQDVVNQNAQALNTLVKQLSSNFGAISSVLNDILSRLDPPEAEVQIDRLITGRLQSLQTYVTQQLIRAAEIRASANLAATKMSECVLGQSKRVDFCGKGYHLMSFPQSAPHGVVFLHVTYVPAQEKNFTTAPAICHDGKAHFPREGVFVSNGTHWFVTQRNFYEPQIITTDNTFVSGNCDVVIGIVNNTVYDPLQPELDSFKEELDKYFKNHTSPDVDLGDISGINASVVNIQKEIDRLNEVAKNLNESLIDLQELGKYEQ
